United States Patent Application Publication US 2026/0191916 A1 - sequence listing, part 39

SEQ ID NO: 154 - DNA, 4937525 bp, Bacteroides uniformis (residues 1-1,645,842 of 4,937,525)
  source 1..4937525: mol_type = genomic DNA
accagagttttcgcggaactatattttatttatcttattaataatcagataattatgctatgtgctagaaataactatagcgaaatttcctttctcacaaggtatgtgtatggagggacgacgcataaaaccttactgctgtgatactatttgttggattaacaaccaagttatcagatgtataccataaagttaatacactgcttaaagattttaaatgattcttcctcttatatgaagcatgtcttttgtcaatatctatcatcttagctgctttcaatgaagtatttattctacattgtcactttattagcgaaactactaaagtctatgtaaaagaatatttcaatagcttcagaaaacagcaaattcaaaactttctgattggctaaacaatcaagacaacaattgtttcctcataacagttttcatcatttttgcttccacgcttccacccgttccttatatccctctattcatcggcatcacagatgctgtggaagcaatgcaaaagtgtggaagcaaatttagcttccacacctccaatcagtttaaatattgataaaacaccaatgttaatcttctattcacactatgctgtatctaattgattataaatagtttcttgctgcaagattttgcaaacctattgcagtgatactgcaaagctgttgcagtggtactgcaagcaatatgcagtggtactgcaaacaatatgcagtaatactgcaaaacgtatgcagtgagtttgcagcgagcaggttgaaacagaatagtgagtgaatagactttaaaggagaagtatatgactaatgatatgaaagtgcagtattgactatgctaagttcgtgtttttttaggcaaaggcatgagtgcatggctcttttctaaatcatgtactatagtcatatccattacattcgtatacacttgtgtggttttaacacttttatgccccaacaatttttgcaccgttgtaatgtttactccattataaatcaatagagttgcattagtatggcgagcggtgtgaaatgaaatcttttttgataaaccggctaggcgggaaatcacaattaaatttttgttcacattagagttatcccttaaatgaaagaagctttgtaagtcatcccgatatttgtccagaataacaagcccttttccttcgaataagagataaagaggcaatctgacttctgtactcgtctttatggatttataaattagccaggtttcttgacggatctccacgatgttatcgggtgataaactgataaaatcagaatatctcattcctgcatagcaacaaaacaagaatgcatctaaagtcttctgcaatttagtatatctgccagccaagcttaatttctccaacttctccagctcttcaggggataagtgcgtatgcttgttttctatagttttaatcttgtactttcgaaaagcgtatttttgtatctctatataatccttgttgatggcaacatttatatgccgcttcagatgcttcatatgtttggctatcgtatttgtgtgatagcctcttgattgcaagaaatattcaaaggaggatatgaattcgaatgttaaatcagaaaaggttacatcctttttgaactgttgtaataatgaaagagtggagaggtgatttcgttttgtactttctttcagagcagagtttgctatctcttgtctacaaaaagaaataaaagaggttttgttttcgcttgtgctcaaaacgtcctttagtaattctaatgaaatacgccttccttgctgccacaattccaactcttttttttctatcatagccataaattcatatatcaatctattcagtgcatccgcattaggatgattcttcacgataagctttttattgtcccattgttctggctttagataaactttggtggagaaatactttttttttctatccaaataggcttctacttgcactaacgccattccttttttattcaggcttctttttctgttgtatactagattgtaaataattttactcattttgtttggttttaattaatactaataacaaataagacgatattctgtgctcagtgagaatagaataagaattaatatctctaaaaagtgtctttttgtgtttagctattaattggtatttaatctccggaaattctcattttgtttcaaaatcaggtatgttttttgttttagcggcttgtttattaaccattttgttttaaaatatgtgtatttcttggaaaaatcaccttgaaagagggaatcatagtgatagtaaacataagccggtttaggttttttaagtatgaaaaatctgttattaagcataaagtagcgtatttaattaacagattgatagatttgcaaggttttttcaataaaatagttgttcgtttcagttttattaatatatttgcactttgttagagtaaagaaacaattaatgtaaagttaaactttaagagagaatttatgaaaagaaaattaatgctgttattggcctgtctttttgttggaataggcctagtaactgcccaaacccagaaggttacaggtgttgtaatttctgaagaagacgggcagccagttattggagcctctgtattggtaaaaggtacacaagttggtgctattaccggtgtagatggtgattttacattaccaaacgtaccaagttccgcgaaaactctggtaatttcttatattggtatgcaaacccaggaggtgacaataaaacctagcgtaaaagtggtgatgaagtctgatacagagatgcttgatgaggtaatggtagttgctttcggtacagcaaagaagtctgcatttacgggttcggctaaggtgataggtacggaaaagctggagcagtcgcaggtgacaaacgttaccgatgctttggctggtgctgtgccgggtgtgacattgacatccaatgacggtgctcctggttcaaagtcatccatcaagatccgtggtttcagttcactcaatgcaggaaacgaccctctgattattgtggatggtgctccttatagcggtgatatcaataatatcaatcccaacgacgttgaatcaatgacggtattgaaggatgcggcttccaatgctctttacggtgcgcgtggtgctaacggtgtaattatcatcactaccaagaaagccaatatgtcgggtgaggccaaagtaactttcgatgccaagtggggagcaaatacccgtgcgttgcagaaatatgacgtgattgacaatcctggcatgtactatgagacgcactatgaggcaatgaaaaactactataaatatgaggggggaatgagtgatcaggctgcatggcttgaggcaaataacaatttgtttggctctaacggtggcttgggttacaatgtctatacggttcccgaaggacaataccttatcggtcagaatggcaagcttaatcccaatgccacattgggtagagttgtgaattataaaggacgcgactatctgcttactccggatgattgggacgatgtaggtatgcgtaccggtttacgtcaggaatataacttctcagtgagcgcagctaatgaaaaatcttctttctatgtttctttaggctatcttggaaatgagggtatcactgaaggttctgacctgaaacgtttgactggccgtttaaaagccgactatcaagccaagaagtggttgaagatcggtggtaatatggcatatgcgcgatttgattccaattcattgagtaataatggttccagtagttctcaaggtaatgtatgggcatttattacccaaatggctcccatctatcctgcttacgtacgtaatgctgatggcagtatcatggttgataagaatggtattggaatgatggactacggtagcggtatcaatgcaggtatgcaacgtcctttcattcctgatgccaatcctattctggacaacaaacttaacacccataatgctgaaggaaatgctatcagtggtaatgcttttgtagacataactcctatagaagggttaaaggtgacattcaatggtactttcaacttggatgagacacgctttacatatgtttataatccttattatggacagttcgattctagcggtggtacagtaagcaagagccatcagagaacttacgactacaacttgcaacaacttgtctcatatgccaaatcattcggaagcaataatttcgatattttgttaggacatgaatattatgactaccgcctttcttatttgggagccagtaagtcacagatgttctctcaggacaatcaggaattggatggtgccattatagatggacagagtgcttcttcatataagagtcgtcgtaacaacgaaggcttcttcggacgtttgcaatacaactatgacgaacgcatcttcggctcagcttccttgcgtcgtgatgcttccagccgtttccatccagaccaccgctggggtacattctggtcggcaggtggtgcatggctcatcaacaaagaaagctggtttgatgcttcttgggtgcaggaactgaagttgaaggcttcaatcggttcacaaggtaacgataacatcggtgatttccgctatacggatagatttaatattattaattccaataatagtctcggcacttcgttctactctaaaggtactaaggacatcacttgggaaaccaataccaatttcaatatcggtgcggaattccaattgtgggaccgcgttaccggtagcatagagtactacagacgcaagacttcagatatgttattctcattctccgtggctccttcattgggttattcttcttatctggacaatgttggtaacatggtcaatagtggtgtagaaatggatttcaatgtgaatatcttcgatacacgtaactttacgtgggacgtaaatttgaacatctcaactttgaagaaccgtattacgatgcttgatcctgacaagttgattactactgagtatacagctgacggaaagggatataagggttattctaacggaagcttcttcattggtgaagatttgtctatgtttacatggcgtatgaaggaatatgccggagtggacgaagagggaagagccttgtattataagaatgttaaggatgaggccggcaacatcaccggacgcgaaacgacttggaaccatgctgaagctgactattacatcacagaggaaagcacgatgcccaaggtatacggtggtttcggtaccaaactgaaagtatatggtgtagatttcggtattaacttcacttaccagattggcggcaagcagtatgatggcacgtatgcatactttatgtcatcacccaaaggcacggcaggttacaactatcacaaggatatcctaaagtcatggactcccgagaacaccaacactgatattccgcgtttcatgatgaatgacccttcatatccggcttcatcatctacacgtttcttgactgatgcaagtttcttgaatatccagaacataaatgtgggctatacattgccttccaagtggacaaagaaactggctataagctctttgcgcgtgtacatgtcggcagaaaatgttttctactggtctaaacgtaaagggttcgacccgcgtcaatcatatgacgagacgaccaacgctactttctattcaccgatgcgtaccatctccggtggtgtgtcattcgagttctaaaactaaatattatagataacaatgattatgaagaaaaatatattcaagttgttttcagccatggtggtatcggctacagtactaaccggctgtatagaagaggtttttcccgaagattctactgcgacctccgagcaaatcggtgcgtcagctacggcacttgaggctgcagtcagtggcatgccgtcacaaatggtacaaggctatctggtgtatggtagccagacccatgaaaccgaccttggctatccttcgctgatgttggcacagtctgaattgttgggcgatgtagtggacacagactatgggtatgactggtggtggcccttcaatgcaagcttgcagatgtatgacaatggttattactcatatttgccttactttaccctatataagttcgttaaatcggccaatgacgtgatttcagttgttgacgttaccgatcccacgattaccgatgagatacgtggactcggcagtatatcccatgctttccgtgcgtttagctattatacgctgatggtgcttttcgagccagtagagaatatctatactgattgtagcaaggtgttgggactgacagtgcccattgtaactgaggaaacaactaatgacattgcgaagagcaatccgcgtgcgactcacgaagaaatggtgaactttatcctttctgaccttgacaaagcagagataggtttggagtcttatatacctactagcaagaattttcccgacttggctgtagtatatggtctgaaagctaaggtatatatgtgggatggccaatttgataaagctgccgagtatgcccgcaaggctattgataagtcgggtgcaactcctatgaacgaagcacagtggcataaccccactacaggtttcaatacggctacttctgcatggatgtggtatcttcaccccacagcttccaacatgggtaaccttgctaatttcatcggtcacatttccaatgaagcggattggggatatgcttctttgtctaaactccaaatggcacgttcactttatgacgcgattcctactaccgatttccgcaaatattcttaccttgacccggacagatctgtttacgcttaccagtctgtgagaggcaatgagtggttggacgaacagccggattatatgtcattgaagttccgtcccgtgggcggtgactatagcacttattctgtgggtgcggctgctgatattcccgtgatgcgtgtggaagagatgtatctcatagaggctgaagctgtaggtgccagccagagtgtggcagcaggtgtacaactgttgaataactttatgaagcaaaatcgtcagtctgattacagttttaacgcaggcgatttgcgtagtttccaacttgaggtcttgaagcagatgcgtatcgagttttggggagagggggttgcattccctactgccaagcgtttgaaaccggatgttattcagcactatgagggtaccaattttaaagaagataacttcaagatcaactgtaaaggtgtgaagcctaactggacgctgatgatccccaagaccgaggtggattcaaatatcgcgcttcaaggaatgaacaatccggacccgaccggtgctattcctaagcgtcctactccgataggagagtttgcgcctggtaacaattaaattaaatgaactaactttataattgaatttgtatatgaataagatatttaataaactgttttgggtcatggctgtatgcggcttgacaatgacggcttgttcagacgatattgactggaatcccggtgctgctgccgatggacaaggggtcttcttcccttcgagtcaatcaagcagtataacgctgaccgagacgtctggttctttcgaggtaagtgtatttcgtacagtaagttcaggagcctccaccacacaaataactgttactcccggtgagaatgctgctggcatttttacagttcctaccgaagtaagctttgctgatggtgtgacagaggcaaaaataacggtgacttaccagaatatgaagcgtgatgtcccctatactttgaccctctctgcagtggacggcactccgtatggcattactgacttgacgatcagtgccatttgtccattagtttgggaagtggtaagtactaatgccacattgatagacaatatgtttgaggcatttggtgctaccggtgttaaactgaccggtattacggtggaaaagcatcccgaacttaacaaatatcgttttaagagtccttatgacaattcttattttaactctttgtttggcataggaactcttcttcctgatgattttaaacttccttatattgagttggacggtaatacttatccgggtggatattatatcactgttacaaaattgggatggaaaatggtaaatggtgtaggtcctgaggccaatagcgattggggaactttcggttctgtttatggaaatctttccgaagaccttggtacttatccattgggaagctacaacgatgctgagaaggtatttgatttgggagctctcttcttttgtatagatgacagtggctctgaattaaattatcctcttaagggtacaactttgctgtatttgaacaactgatttttgtttgtattccgtgtgatacggaacttatgaatgtggagggtgaattataatagaattcatcctccctttattttatctctctttctaaggagcttccgctaaaattatatatatttgctgcccgaaccaacaatatatataataaggtatagaaactatgaaagaatttgtaatctccgaagtgcgggcagaaacagcggtattggtaggtcttgtcacgaagactcaggatgagcgtaagaccaacgaatacctagacgagcttgcattcttggctgagacagccggggcggaagtagtaaagcggtttacccaaaagctggaccaggcgcattccgtgacctacgtcggcaagggcaagctggaagaaatcagagagtatatccggaatgaagaagaagccgaacgtgaagtcggcatggtgatttttgacgatgaactttctgccaaacagatacgtaacattgaagcggagctgaagattaagatattggaccgtacttcgctcattctcgatatttttgccatgcgtgcccagactgccaatgcaaaaacgcaggtggagctggctcaatacaagtatatgcttcctcgtctgcaacgtttgtggacccacttggaacgccagggtggtggctccggtgccggtggaggtaaaggttccgtgggacttcgcggtccgggtgaaacgcagctggaaatggaccgccgtatcattttgaaccgtatgtcattattgaaggaacgcttggctgagattgacaagcagaagtctacccagcggaagaaccgcggacgcttgattcgtgtggcattggtgggatataccaatgtaggaaaatccacattgatgactttgctttcgaaaagtgaagtctttgccgagaacaagttgtttgccacgttggatactacggtgcgtaaggtgattattgagaacctgccgttcctgctttctgatacagtgggctttatccgtaaattgccgacggatttggtagactccttcaagtctactctggacgaggtacgcgaggcagacttgctgttgcatatcgtagacatctctcatccggattttgaagaacagatagaagttgtgaacaagacgttggcagatatcggtgccgccggtaagcctatgattcttgtattcaataagatagacgcttatacctatatagagaaagcggctgacgaccttacccccagaaccaaggaaaacttgacactcgaagaactgatgaagacgtggatggctaagatggaggataactgcctctttatttctgcccgcgaaaaaatcaatatggaggaactgaagagtgtggtttatcagcgtgtgaaggaattgcacgtgcagaagtacccctataatgactttctttatcagacctacgaagaagaagtttaattttagttatgagtgataagttatgagttatttgctggcagcggtttgaatcggtagtgccggcaaaggcaataacttataactcataattcataactcgttataaggatgaattacagaagactgaccgaagatgaaattctccggttgaagagccagtcatgtctggctgatgattggggaaaagtagctgttgcagaagagttctcaacggaatttgtgcatcatacccgtttttcgggtgaggtgcgtttgggagtgttccattcagaatttatgttgccgggaggaatcaggaagcattccggtttgcggcatgtgacgctgcataatgtaacggtgggagataactgttgcattgagaatatccagaactatattgccaattatgaaatagggcatgatacttttattgagaatgtggatattattctggtagacggtgtgtcgaagttcggtaacggggtagaagtgtctgtcctgaatgagacgggaggccgtgaggtgctgattaatgataaactctccgcacaccaagcctatattctggcgctttaccgccatcgtccggaactgattacacggatgaaggaaatcacggatttttattccaacaaacatgcttctgctgtaggaagcatcgggaaccatgtaatgatattgaacaccggttccataaagaatgtgcgcatcggtgattattgccgcatctgtggtacatgccgtctgtataacggaagcatcaacagcaacgaggtggcgccggtacacatcgggcatggggtgatttgtgatgatttcatcatctctaccgggtctcatgtagatgacggagctatgctgagccgctgcttcgtggggcaggcatgcaagttgggacacaactactctgcctcagactctttgtttttcagcaactgccagggagagaacggggaggcgtgcgctatttttgccggaccttatacggtgacgcaccataaatccacgttgctgattgccggtatgttttcctttatgaatgccggttcggggtccaatcagagcaaccatatgtataagttagggcctatccatcaaggcactttggagcgtggtgccaagacgacttccgattcgtacatcttgtggcctgcaagggtgggagcgttctccttggtaatggggcgccatgtcaaccattctgatacttcgaacctgccgttctcttacttgatagagcagaataatacgacttatctcgtgcccggtgtcaacctgcgtagtgtgggtaccatccgcgatgcccagaagtggccgaaacgtgacgggcgtaccgacccgaacaaactggattacatcaactataatcttctcagcccctacacggtgcagaagatgttcaagggacgggagacgttgcagaatctgcgtcatgccagtggcgagctttcggacatctattctttccatagtgcgaagatacgtaactcggctttggtgaaaggtatccgcttctatgaaatagccattcataagtttctcggaaactctgtcatcaagcgcttggaaggcattgacttccggagcaatgaagaaatacgtgcccgtttgaagcccgatactgccattggcagcggcgaatgggtggatatttccggattgatagccccaaagagtgagatagatgcgctgatagacggtattgagtccggcaaagtcaatcgcttgaagtctatcaatgccgagtttgagaagatgcacagcaactactacacctacgaatggacctgggcgtatgagaagctggaagagttctatggtatcaggccggaaggtatgacggcggaagacgtcatacatattgtcgaaaaatggaaagaagcagtagttggcctcgaccgcatggtgtatgaggatgccaagaaagaattttcactggcttccatgacgggctttggagccgatggctcacgcttggaaaaggaactcgactttgagcaggtacgcggcgattttgaaagcaatccgtttgtaatggctgtactgaaacacattgaggtgaagacggcgctgggcgatgaactgatagggcggatgcagcgggtatcagaaaattaattatgatttgttgcgtttttactctaattaaagaattatttcaataatagtttttacctttgctcggtaaaggcggttttgtgctgtctttgctacccgaatcacttttaaacattaaatatacgagtaattatggcaacaacacctccgttcaagtatcaacccatgttcgagaagggaaaagatactactgagtattatctgcttacgaaagattacgtgtcagtaagcgagtttgaaggaaaacctatcttgaagattgaaaaagaaggtttgacggcaatggccaatgcggctttccgtgatgtatcgttcatgttgcgtcgttcgcacaacgagcaggttgctaagattctgagtgaccccgaggcaagcgacaacgataaatacgtggcactcaccttcctgcgcaatgccgaggtagcatccaagggggtacttcctttctgccaggatacgggtacggcaatcatccatggtgagaagggacagcaggtatggaccggctactgtgacgaagaagctctctcactgggtgtttacaagacttataccgaagagaatctgcgttattctcagaacgctcccctcaccatgtacgatgaggtgaatacgaagtgcaacctccccgcacagattgacattgaagctacggaaggtatggagtacgagttcctctgcgtaaccaagggtggtggctctgccaacaagacttatctctaccaggagacaaaggctatcctcaaccccgaaacattggttcccttccttatctcaaaaatcaagactttgggtacggcagcttgtcctccctatcacatcgcattcgttattggcggtacctctgccgaaaagaacttgctgactgtgaaactggcttccactcacttctacgataacctacccactaccggcaatgaattcggccgcgctttccgcgatgtggaactggagaagctggtactggaagaagctcataagattggcctcggtgcccagttcggcggcaagtatctggctcacgacatccgcatcatccgcctgccgcgtcacggtgcgtcctgccccgtgggtctgggtgtttcctgctctgccgaccgtaacatcaagtgtaaaatcaataaagaaggtatctggattgaaaagctcgacagcaacccgggtgaactgattcccgaagaactccgtaaggccggtgaaggcgacgtggtgaagattgacttgaaccagccgatggccgatattctgaaggaactgaccaagtatccggtttccacccgtttgtctctgaatggaaccatcatcgtaggccgtgacatcgcacacgccaagctgaaagaacgtctggaccgtggcgaagacctgccgcagtacatcaaagaccatcccatctactacgccggtcctgccaagactcctcaaggcatggcttgcggctccatgggcccgactactgccggacgtatggacccgtatgtagacctcttccaaagccacggcggcagcatgattatgcttgccaaaggtaaccgcagccagcaagtgacagatgcctgccaaaagtatggcggtttctacctgggctctatcggtggtcctgccgctatcttggcacagaacaacatcaagagcattgagtgcgtggaatatcccgagctcggtatggaagctatctggaagattgaggtggagaacttccctgcatttatcctggtggacgataagggcaacgacttcttcaagcaactgaagccctggaattgcagcaagtaaaacagaagccttttagaaaggcataatataaggaaagccgtaacggagaaaatcttgttacggcttttttgttttgtagaggaaaacaaagtgtttcgcggcatagaacactctgtttcatcaagcaaaacaaactgttcctttatgttgaaacaaattgtttcttcctattgaaacaaactgttcttttatgttggaacaaattgttcttccctattggaacactctgttctgccttgataaaacagattgttctctataggagaataaaactgaaactcgtttgttgtcgtatttttgttacattctccttttcatttctcggttaacttctttatctttaaccctccaaacaaccaatttaataaaacatggaaccaactcttacacgacaaactccggcacaacacatcgtatggctggatgtggtacgccttgttgcaatgtttacagtagtttgctgccattgcacagacccttttaacttctatccgggcacatcgcccgacattgttgacatcaagttctggggagctgtctacggtgcggtgctccgtccttgcgtaccgctttttgtaatgattaccggtgcattgctgttgccggtacggggtgacgcctcggcattctacaagaaacgtatcccccgcgtattctttcctttcctcatctggtctgtgatttacaatctgttcccctggataacgggactgctgggagtggatccgaaagtgattctggatttcttcccttattcgggtgaggaagtgatgcgccagtctctggcagtgagcctgggatatattgcagaaatgccttttaatttctctctattggatgtacacatgtggtatatctatctgctgatagggctttatctctatcttccgatattctcggcatgggtggagaaggcctcggaacgtgccaaactatggtttcttgcagcatggggagtgacactgctgctgccttattataccgagtttgccgctccgtacctttgggggacttgctcgtggaactcgttcggtatgctgtattactttgccggttttaacggctacctgttgttgggccattatctgaggaaccataactggacgggccggcaactctgtggcatcggcattcccatgtttgccattggctatgtcgtgacattccttggtttccgtcgtatgacctccttgccggattttacggatgagatgctcgaactcttcttcacctactgttcgctgaatgtagtaatgatgaccatccccgtgtttatgctttgcaagcgggccaatttccgttcggagcgcatcaagaaagcattggcaaacttgacgctctgtggttttggagtctatatgatacactatttctttaccggaccgagcgtagtcttgatgcgtgctatccatgttcctatctatcttcagataccttgtgccgcagtcgtcgctttctgtacttcctggtttctggtggcaatggcataccgttgtttcgggaagcggaccaagtgggtgctggggtagtttggatgaaagattgtttatctttaaaggaggagatttagggcttattatttcctccagattctccacatatagtaagcgcagtgcgtgaatgcgaaaacaaacgagataatcagcagcactttgctttctccccatcccacagtctgttggtgccacagtccggtgatgacacaaagaacggcaaggataagtccaatcatgttcaaggccacctgcccgtggcgggtggcgcctccatgctccagcttactgtgcttcatgccgtagcccacgtagatgtccaggccgatgagcatccacagcaccaggcgtatccatgtatcggcaggaaggaacaacatcatgcaaaggcaagtaagaatacccagtatggggataagtggaacaagtggggttttaaaggaacggggcacgtcaggcatggttctgcgtactaccagtacagcggcacagaccagcgtgaaggccatcagcgtgccgatgcttgtcatctctccggccagccgtgcgggtacaaaagctgccagcaggcccacaagtaccatgaagagcaggttgctgcgtgccggagtacggaacttttcgttgatatgcgagaagaaaggaggcagcagcccgtcatggctcatgcttaggaatacgcggctctgtcccagcagtgtcaccatgatgacggagcaatatccgaacagaatggacagcacgatggcacggttcagccagggatagtccggctggatgatacctgcagcatcagcctgccccatgtgctctatggctatggcaacgggagcaatgccttgctgtccgctgaaggcggtgtagtgtgccactcccgtcatgacgtgggcaaaaaccatatagagcacggtgcataccagcagggagaccagaatgccgataggcatgttccgcttcgggttcttcgtctcttgggcggctgtgctcacagcgtcgaacccgaggaaggcgaagaatacgatggccgcccctcgcaggatgccggagaagccatattcgcccagcacgcccgtattggcagggatgtaaggtgtatagttgtcggtattgatgtatttccagccgagtatgacaaaaatcagtatgacggaaaccttcaggaatacaatgaagccgttgaagatggagctgccttccgtaccccgtatcaggaagaggctcatcagcacgacgataaggaaggcggggatatttacgactccgccatcccagggacaggcggtgagggcttgcggtagatgtatgtccagtccctcgagaaagacgaccagatagcggctccaactgatgcttactgtggttgcggctacggtgtattccaataccaggtcccacccgataatccaggcgatgagttcgcccatcgtggcatacgagtaggtgtatgcgctgccggctacgggtatcatggacgcaaattccgcataacacagtccggcgaagcagcatcccagtgcggcaatggcaaaggacagtgtgatggccggtcccgtatagcctgccgccaccgttccggtgatggagaatagacccgctccgatgatgactcccacgcccagggcaacaaggctccacggaccaagtacacgtttcaatgttttctttccggaggcattagcctccgcttgcagtgcctcgaatggctttctgatgaataatcccattatgcttcaattctgataaatcgggcgcaaaggtacggattatattgcttattccatatagcgcgctacttttccactgatttgcagtagggagatttcacataatttggtatcatattctgcggagagaatacgttcttctgcatccagcagactcttttgggcttcgcgcatctcgattcccgagaggttgcccagcatatatcgttccatggcaatctcgtggttctccttggcagcgacaaggttctggcgttcaaggttcagcatttgcaggttgttttggtaggcctgccataggttgctgaggtcggcgcgcagggcttgctccagttgctcccgttccaggcgagcgttctgcacggcaatgcgggcattcttgcgttcgcggcgccggttgccgtcgaacagattgaagccgaccgtgacgccgaagttcagaccgaggttgctgcggcggctgttggcagagatgtcatacttgttgagggtgtagccgtatccgccgttcatcttcacgtatgggtagtcgcgcgagcagactttcttgtagtccagacgggccagggtattgttctgttcggcacgtagcagtgaggcgttgatggcgagggtggcgttccacagctcctcgaagttcagggaggcggtcacgttgatgaggctgtcttgtatgataaacggctggtctacatctttgtttgccatgagttcgttcagctggatacgtgaggtgtgcagcagttcctgctgtttcatgtattgggcactgtcggcattgaagtccactttggcctgctggtagtccaggcgcgagaagttaccgatgtggtaacgctcttccacaatgcgcaggcgctctttggatagcgatacggcataacggaagttcttcaagcggattttctgctgcacatagttatagtattcggcggctatgttggctatcaggtcctcgatggcgatgcgcgtattggtctcgccttggcgttccagctccttgagccgttggtagttggcggtaatgttgaaaccgtcgaagatggtccagttcaggttgatgcctgcatcgagagtttggtcaaacactccgttgtccttggttgtctctccggtggctcgggctttggtctcggtattgtctatggttcccttgtagccggcggagaggtccagtgtgggcaggtagcccgcattgcccagtgtggcgttgttcttgctgacctgctcttcattgcggacaatgcgcagggagtagttgttcagcaatccctgctccaggcaggacttcaaggtgtaggtaggcgcaggctgtgcataaaggcccagcgctgtgcaggcagtggctatgaaaattaaaacaatgcgtttcattcggtcttcagtttacttcggttcgttgatacataactatatatggcaggcacgatgtacatcgtcagtagtgtggagatgagcatgccgcctacgacggcagtacccatggcgatgcgctggttgcagccttcgccggtggcgtaggcaagcggtatcagtcccaggatggtggaagcactcgtcatcaggatggggcgcagacgttgcagggaggcgtccttgatggctcgcatcttgtcttcacccgcttcctgcttctgattggcaaattccacaatcaggataccgttctttgccaccagaccaatcagcatgataataccaatctggctgaatatattcatcgtaatccccccgaaatacatgaacaccagtgcgccggcaatggcgagaggcaccgtcaacatgataatcagcgggtccttgaagctttcgaactgggcggccagaatcaggtaaatcagcacgatggccagaatgaaggcgaacatcagactggaggaactctccctatactctttggagtctccggtcagtgcggtgcggaaggtctcgtccagcgtctccttggcaatcttgtccatttcatccagaccttgtccgatggtcttgccgtccgccagtcccgcggagatggtggcagaaacgaaacggttgtaacggtacagtttcggaggtgcgatgccgccggtaagctcaatcaggttgtccagctgtaccatgttcccgttgtcgcttcggatatagatgcctttcaggtcggcgggcttgttgcgttgctggcggttgatttcgcctaatatctcgtattgctttccgttcatgtagaagtagcccatgcgctgtccgctcaagccgtattgcagggtttgggcaatgttcttggtgcttacgcccatgatgctcgccttgtcacggttgatgttgatgcgcgcttcaggcttgctgaacttcaggtttacgtctgccatctggaataccggattttcgtagaccttcgtcatgaacttggggagcacctcctgcaatttctcgatattggttgcctgcaatacatactgcacgggcataccgccgcgccgtcctccgaatgaggaggactgctgtacgaaagagcgtgccatggtctttttctgcactgccttcgacaacttttcggcaacctccatctgggtatagtcacggtctttcatgtctttcagtgtgatacgtacgttaccgctaccactggacacacgcgccgtgaccgcttctgcatccgggataatggagtccaccagatgattgatgtcttcggtatagtcgcggatatattcgtaagtcactccttcggcacccattgtattgatactgatttgcgaacggtcctccaatggcgccatttcagccgggatagtattccaaaggactccgataagcaggatggtgacgatggtgaagggcaaggcaatccagcgccgtttcaggaaggcagccagtgactggctgtatacccggttcatcccttcgaagaaaggttcggtcttgcgatagaaccagctctgctgttcccttttgattaaaagtttggtggcaagcatcggcgtaaaagtcaatgcggcgaaggaggagataatcaccgaaccggagaccacgatactgaattcgcggaacagtcgtcctgtcgtaccgtccatgaatacaatagggaagaataccgccaccagcgtaatggtagtggagatgacggcaaagaaaatctccttggctccttctatgccggcttctttcggtggcatccctttctcgatgcggacataaatgttctccgtcatcacgatggcgtcgtccaccaccaagcccacggcaagcaccacggcaagcatggagagcacattgatggagaaaccggccagatacatgacgaagaaagctccaatcagcgaaacggggattacaatacatggcacaagcgtcacacgccaatcgcgcaagaagaggaaaatgatgatgataaccagtacaaaggcctcatacaccgtctgcttcacctcgtcgatagaagcgcggataaacttggtattgtcaaaaccgtagttgtaatgaacatcttcgggaaggtctttcttcatcttctccatgcggtcatatacggcgttggctatttcaatgtggttggcacccggctgcggaattactacgacacctaccatgggcacaccgttcatcttcatataacttttgatgtcggctggtcccagttcggcacgtccaatgtcgctgaagcggacaatacggttaccgtcttccttcaggataagattgttgaactcttcggctgtatgcatcagacccaacgtacggatggtgagctcggtagtgtttccttcgatacttccggaagggagctctacgttttcgttgtccaccgcattctttacatccaggggagtgattccatagccggacatcttgatggggtccagccaaagccgcatggaatagcgcttttctccccagatgcttacactacttacatctgaaatagtctgaagctgctccttgacagtcaggtcggctatttcactgagctccagtagggaacgtttgtcactttggagggcaaccatcaggataggggtggcgtccgcatcggcttttgatacggtaggcgggtcacagtcacgaggcagatagcgctgtgcacgcgacactttatcacgtacgtcgttggcggcggtttccaggtcaacggaaagctcaaactctactgtaatgcgtgatgaaccttgctggctgacactggagagggagcgtatgccgggaataccgttgatgttctgctccagaggctccgttatctggttctcgatgacatcggcgttggcacccggataggagcaggatactgatatgatgggattgtctacagacgggtactcgcgtacacccagataattgtagccgatgaagccaaacagcaggattatcagggtaagtactgtcgagagtaccggtcgccgtatacttaattcggatatattcattctttacaattgataattaacggttgataattgacagttgtcaattgatattgtccagtgttaccggtagtccggtacggagttgcagggttcccgaggtgatgatggtatctcctgcctgcaagccttgcaatacttgtacttccgcttccgtacggattcccgtagtaatctctaccggctgggcttttcccgacttatagaggaatatcttgtcttttcccatttccggtacaatggcttcggacggtacggcaagggcgtcctgaatttcatccttgttcagcttgatgctggcatagcggcccggaagcacagctccgttggcattgggataaagtgcacggattgtcagggtatgggtagtagggtctatctttgattcgcgtgcataaaccgtggcgtggaaggtgtttagctttccttcgagagtgaagtccagtccggcgccggtctttacgtcattggcataccgctcgggtacggcaaattccaccttcaacggcgaaatcttggtgagtttggctacaatggttgtaggggaagcgtaagtacccacactgacttggcgcagaccgatgacaccgtcgaaaggagcacgcagctcggtttgtgcgatgttcgattctatcaagtcaatgtcggcattcagggtggccagctcggtctttacttgttcgtaggcttctttactgaccgcatccctttccagcagggcgttctggcgaaacacgcggtcttccgccaactttaattgggagacgaggcgttgcaattgtgcttgcagcggccggtcattaactttggcaagtaattgtcctttcttgacgaagctgccttcttcaaaatttatctctatgattttgccggatgtctcgaaagaaaggtccacttcctcatccggcagcaggctgccgctgatttgtatttcatccttcagcagttgcggtttgattatttttgcgtttacgtttagaattttcttaccgctacgttgaccggtcatcaccttgtctgcagcggctaattcttcattctctttaggtaattgggagtagattcctcctccaatcagtccggcaccaatcacgataatgatgccccatttaactctcttattcatgttgtagtattagtagtaataaaatcagccttagattagactacgggaaaagagaatagtttaaaagataaagagttaaaaagtgtaagaatatggattggaaaggtgataaaatgacaaatcagtaagcagcccggtattttccctcctccttgtcctccagcatattcagataagaagcgtaacgggattcgctgatatagtgcttctcgacagcctcgcgtacagcgcattcgggttcgtggcggtgggtacagttgccgtaacggcagttggcagataccttgaatatttccgggaaatagtggcctatttcttcttcttccatatcgaatgttccgaaacctttgatgcccggagtgtcaatgatatatccgtcaccgggaaccgggaacatttctgagaaggtagtggtgtgcatacctttattatgataggtggatatctctccggttttaatctctatatcgggcagtattgccttgatgagtgtcgatttccctactccggaatgtccggaaaagagggttatacgtcctttgagctcttcctcgataatatcgatgccttcctcttttttggcagaaaccttgaaacatggataaccgatggtggtataaaggttgatgagactgttcagatagtgcagttcctcttcgttgtaggcatccactttgttgaatataatcttgacgggaacacggtatgcctcggcagaggcgagaaaacggtctataaatgtggtggaggtttcgggatagttcaccgtcactatgagcatgcactggtcgaggttggcggcaagaatatgtgattgcttggaaaggttggaggcacggcggatgatgtaattcttccggtcctctatctcgctgataaaggccgtaccttcctggttcagtatgatgttcacgtaatcgcctacagccacgggattggtgcttcgtatgcctttcaaccggaagttccctttgattttacattcaatctcccttccgtcgtcagtccgtaccaagtaccagcttccggtgttttttataacgagtcccctcaaaataattgataattgataattgataattgataattgataattgattgctggataattaactataggtattattacacatgataattatcaactgtcaatcatcaattatcaattcattaaacggtcatgatttctttatcctttgcagccagcatgtcatcaatccgcttgatgaacttgtcgtgaatcttctgcagcttttcttcaccgcctttctgggcgtcttctgccagtccgtcctttacggatttcttcaaggcgtcgatggcatcacggcgtgcattacgtacacttactttggctgtttctccttctcccttgcattgtttggcaagctgcttccggcgttcttccgtcagcggtgggatgccgatacggataatttcaccgttgttttcgggcatgatgccgagactggagtcaatgatggccttttcaatgacgcggaacatgctcttatcccatggcttgatggcaatgctgcgtgcgtccggagtggttacggctgccacattgttgataggaaccatacttccgtaagaatccacacggataccatccagcaaacggatatcagcttttccggcgcggatatgagccaatgcctcgtccagatacatgatggccatgtccatactttcttgcgcttcgtctaagatgtcttttacgtctctcatattattttcgtttttggaatagctttaatttgaaactttgcaaatataattattaaatcgggaattgagaattaagaattaaataacattcatttttttattctcaattcttcgttttccgtttttaattcaattatgtaccagtgtaccgatttcttctccttgcatcactcttttcagattccccactgtatccatgtcaaaaacgatgatgggtaggttgttctccttgcacatgcaggtggcggtgaggtccatcactttcagaccgcgcttcagtacttcgtcgtaagtgatgtcgtggaatttcgtggctgtcgggtccttctccggatcggcggtatagatgccatccacacgggtacctttcaacatgacatctgcctcaatctcgatgccgcgcagactggaaccggtatcggtagtgaagaacggattgcctgtaccggcggacatgatgactacttcgcctgcttccatacattcgatggcacgccatttattgtagaattcaccgatgggttccatacgtacggcagtcagcacgcggaccttcacgccggtagctgccagagctgaactgagggcaaggctgttgatgacggttgccagcattcccatctggtcgcctttcacgcggtcgaatcctttgtgggcaccgttcaatccgcgaaaaatgtttccaccgcctatcacgatgcctatttgtactcccaattcgtggatttctttgatttgagctgcgtactcggcaaggcgtttttcgtcaatgccgtattgcttttcacccatcaggctctcgccgctgagcttcaataagattcttttataggttgtcataatatatagttttgttatatttctttgcagcaaagataaagaataaaactgaaaagtgctgcagaatgaggtaggatagttgcctaacgtattgtctttaggaactcgtccatgctgtgatataacggaataccataatggttacaagtaattcgcacattgtcgtagcggtagaagccgggctcgcagatgacgtgcagtttgccggaacgcatgtgcagccccatctccagcagagtgatgggagacttactgcttgccaggatattcatgattatcaggtcggctttttccagatgttccagttcccagttcacttgatgttcaaagtcggacatttcaccgctcaaccccttgtcccttcgggggttgtataggagatatttgccttcgggacgtgctcggaaccagtcgcaggttgccttttgccagtctatgctcttgcccatgtcaatggtcccagccaggaaaattttggtatattcagcttcgttcacttcggctttgtcttcatccggacggagtacgatcacctcggactgagcttgtaggccgatagggaataacagaactaaaagcaggtagagattttttttcatggttgatgatggtttatagaattagttgtttttcttgctctttatcgggagtcttggaaacagtttcctgaaacgaaccagttggcctgtaatgtttccccctgcgatgacgagcgttacggctacaataatcatcaccagtccgatgctttctctgacagtcaagctttctccaaagacagctattccgaagaagatggctgtcacgggttccaatgcaccgagaatagcggtcggggtggagccgatgtattggatggctccagtagtgcagaggaaggatatggcggtgggaaagacagccagtgcaagcaaattgccccacagataccactggtccggtgtgttcagtactccggaatagagcaggcgtgctacgaagagcgataagccgaagagaaggacatagaaggtgactttgagtgtagctacatttttcaatgacgtctggttgatgcccacaatgtatatggcataggaaagggaggaagcgaaaaccagcaatgtccctatcaggctcagcgtactgccgtcctcacttttatagagcagcccgatgcctcccagtgcaagcagcatgcagacgatggtttgcagtgccagcttctctttgaagaccatagccataataagagccaccataatggggtagatgaacagcagtgtcgatgctatgccggcggccatataattataactcagaaaaagcgtcagtgaggagagggctacgagtaatcccatgatgatgagcggaaatgtttctttccgttgtatcttgaatgtccgccctctcgcttttatcataatacccagcaatgggatggcaaaaaggtatctgaaaaagagtaccgagtccggatccatgccggctttgtacaacgggagggcaaacaatggattcataccgtaggaggctgcggcgatagaacccaaaatatatcctttagcttttgcattcatatctttatctgtagattagcgtgcaaaggtagatatttactttgatttcctctttcttttctgtatgaaaaccgtatgaattttacccttataccttcagtgtgtagtcaccggcttcttctgtcactgccttctgcaattcttcgagtgtcttttctccgtctgaaagctctacgatggccaccggagggttcagggttacggtggcatgtacaccctccatactatttaatgctttctctacgtgcatgcggcaatggttgcacatcataccttctaccttgaattcttttttcatgattgtttctgttgatggttcaacttttttgttttcttccctttcatgtatctttttccgttttagcagcaagctgttgctcaccacactgacactgctgaatgccatggctgcgccggctatcatcggattcaacaggaagccgttgatgggatagagtattccggctgcaatgggcacacctactatattgtatataaacgcccagaacagattctgccggatggtccggactgtcagacgggacagccggagggcttccggaatttttgtcaaatcggaggagatgatagtcattttggctacgtccatggcgatgtcactacctccgcccatagcgatactcaagtcggcttgggcaagggcggcgctgtcgttgatgccatcgcccaccatcgccactttccgtccttctgcttgtaaccggctgataaaggctgccttgtcctgcggcagtacgctcgcttgataatgcgcaatacctgctttgcgggcaatttcgcgggcggtggtttcattgtctccggtcagcatgtggacttcgataccggtggcacgcagctcgtcgacggcacgaatggaagtttcctttatccggtccgtgattccggctattgccagtgcgttttcttcgtcggcaaaccagatgacggtttgtgctttcgctgtcagtcgggtggcttcttcccgaagagaccggctgatggcaatccggttctcttccagtagtttcaggtttccggcaaagtaaatccggccttgtgtccgcccttttacaccttttccggtgatggtttcgaaatcttggatgtcgtctatggaagccgattccttgaggtgattcactacggcgtctgccaatggatgttccgataacttttccagactgtagaaaatgtccggcaagacatcttttgaggaaatgcttggattgggagtagttgtcggcgtattccataccagcttactgactaccggttttccttcggttacggttccggttttgtcgagtactacggtatttacctttttggcaatctccagactctcggcatcttttatcaggatacccctttcggctcccttgccgatgcctaccatgatggctgtaggagtggctagccccagcgcacacgggcaggcgatgataatcactgtgacaaatgccaataatccgtgggtgaatccgtcggttccgtccagcatcatccatacgatgaaggcgagcactgcaatgccgataatggtaggcacgaatatccctgctatcttgtcgaccagttgctgtaccggtgctttgctcccttgtgcgtcttgcaccatgtgtataatctttgccagcagtgtatctgtgccgactttctctgcccggaagcggaaactccccttctggttgatggtacctgcgaagactttggcatctttttgcttggacactgctaccggttcgccgctcagcatactttcgtctacgtacgaagaaccttccgtcacgatgccgtccactgcaatccgttcgccgggcttcaccagtatgatgtcgccggggcgaatctgctcaatagggacaatgcgttcctcattcccaacgacggtcacggtcttgggttggagtcccatcagcttcttgatggctgttgaagtgtttcctttcgccttttcttccagcaggcgccccagcaggataaaagctatgatgacacttgccgcttcaaaatacacatgcgggtggatgcccctggacagccagaagtccggaaataacatgttgaacagactgaacagataggctgttccggtgctgatggctaccagtgtatccatattggcgctgccatgtctcaactgtttccaggcactgctgaagaatccccgtcccagccaaaatacaataggagtggatagtgtccacatgataggattggcatagggcatatccatgaaaaacatacctattatgataacaggtaaggatagaataacggcccagacagtgcggagtttcagtgtagtgaattttttgttgtgggcctcttccgcttcttcgagcgtattgccgtcccgatttatcagcaagtcatatccagcggcctgcacggcttgctgcaatgcctcggaagaacagttcttgggatcatattctacggttgccgttgccgaagcgtagtttacggctgctatcttgacaccggactgccggttcagcgtcttttctatccgtgcggcacatgatgcacagctcattcccaatacgggaaatgtctcttgaacaatattcttgtctgtcataacaattatgtatttaagtttcgtaagttcttgaacttgcgaaacttgagttatgtataagtcatagcgatacaaagataatgctttttccccttgaaatgttcatcgcttaaaatcgcaataaataggctacttctcactggggaatgcttttttaatgactccccgactcaatcccgtctgcaccgctccccgcatcaggaggtaggtgaggaaggcaagccataaagcatggtttgccaggacgggatgtaggccataatacaagacaaagaagctgacggctgctgcagtcatggacagcagcatgccgcgcgtggctgtggcacctataaaaatgccgtcccaaatgaaggcggctataccaacggcaggaacggcaagcgcccagtagaaataggtgtcggcaaccgctatcacttctttgtcatccgtcaatagcccgaggaaggcattacctcccagtgcataggtcaacgtaaagagaactgccattaccgctccccatccaaagagatgtcggacggtgtctgtaaaggcttcccggttgtgtgcgcctatgtatctgccgctcagggcctcgcctgcgtaggcaaaaccatccattacatacgagaacaaagtgaagagctgcatcagcagcgtgttgacagccaaaatgatttcgccctgcgaggctcctgctgaagtaaagaacagagtaaccaccaccaggcaaagggtgcgcagaaaaatgtccctgttcacttggaagaattttagcattgtctccttctcccagataccttttctttcttcccctttaatttccaatttataatttttaatttcccagtatctctgcaactttccataattgcgtatccagagcatcagccctatcaggaaaccggcgtactgggctatcagcgtccccagggcaactccttcgactttcattccgcatagatagaccaggcagaggctggcaatgatattgactatattctgtgtgatggctatatacatgggaatgcgtgaattctgcatgccgatgaaccatcccgtgagcccgtatagtcccagcatggcgggtgcaccccagatgcagatgtggaaataaagcgttgccatctctttgacctcgtctgtaggatgaatcagcaggaatgcgccttgtctgatggggacttgcaatgctgtgaggcaggacgcgacagccagccctatgccgacggagcgcactaataggcgtacaacttccggcaaatcccgttttccgtatgcttgtgaagtcattccgctggtccccatgcgcaggaaaccgaaaatccagtagatgatgttgaacagcatcccgcctacggcaatggctccgatataggccggtgagcctaagtgtccgacaatggctacatcaatcagtccgagcaaaggaacggtgatgtttgatacgatggaaggcagtgctatttgcaagatttgcttgtctctgagcttcattggtaacgcttatttcataagattggcaaagttacgcagaaaaggggaaaatagtgggaaagattaactatattttgttgatgtttgcagtgaaagtgtgtaaatttgtaggtgaatttctatggagatgattcaggctgttaaactattatatactttaaaaatgaaatccttaactttatttttctctttgtttctgatgttgcctctgtcagttttcgctcagtcggcgggtgaattgttacagaaagtttccgaagcgttgtccgaaggcaaggacgattatgccgtaagtctgtttcgtcagtcggcagatgccggtgtggacctggcggaaatgttctattgggccaatgttgacaagaacactgtggtagcttcccgtctggccaatgagctggctgcccattacaaggaaatgcggaattacgacaaggcctatctcttctataaggagttcttgcaacgccatcccgaagatgtgcctgcccttgtttcttgtgccgagatggaaatgatgcggggaaaagagaaggatgctctgaaaacctacgagaaggtactgatgctcgacggtgataacctgcaggcaaatatcttcttggggaattatttctatcttcaggcagaaaaggaaaggaagaagctcgatgatgactttaagaagataacttcccctacgcggatgcagtatgcccgttatcgtaacggtttgtcggacgtgcttaccaatagctatagcaaggcaaagacctatctgcaacgggtgctccaggtatttccttccatggaggcaggcaatacgctggaaagaataaagaagatggaggcggagatgcgttaatagtagctcaatctcctttttgagatacggattgcgcaagtaatagatttctaacgcttattcatcgcgggtgcgaagcgaggtgtcgtgcgggaagacttgcttggcgaggcatagctgttcactcccatattcttccgagcagcgtcttctccgacaagatgatggatgcctttcctttcatgcctttctgcatgaaagggacttctttcagtgacagtataaaacagaaatagttgtgcccgttgcggctgattatccgtgtagaaacggttgtgacagttccttgcagatagccgtattccttgcttgtatatccttccagttcaatttctgctttcatgccagtacttacttgtgtgatgcagacatacggcagttctccggtagctgacacttctccttgctgaatgtccgtcagggtgatgtcgcattccgttgtttcgggataggggacaaatgcggctacagccagcagcaaagctataattattccgatgatgccgattccgctacgtaccagcagcggaggaatctgcccgatgattttccgtacctgtttgcttctgagttctatatccttgctttccatatgctaactgcccaattccaattgattcttcacaagattataataagctccccggctggctatcagttcctgatgctttccggcttctatgattttccctttgtctatcactactatccggtcggcgttctttacagtgcttaggcgatgggccaccacgatcaccgttttccctttgtagaactccgtcaggttctctacaattatccgctcgttgttggcatccagcgcattggtggcttcgtccagaaagatgtactgcggattcttgtagacggctcgggcaatcagtatccgttgtttctgcccttgactcagacccacaccgtcttgccctatcagagtgttgtatttcagggggaggcgcatgatgtagtcgtttatattggcaatccgggcagcctctgccagccgttccttgtctattttaggttgaactggttgagatctgtgtcgccgatggagatttctccgcccaatgccttgtagtagcccaacagcaatttgatgatggtcgtctttccgcttcctgttctttatttcgttgatgaagatgctgcctgcttcttgtgtctgttgcagtttcaggttcttcatgttggcttcgaaaagttcggcctgcacgtcttcccactcccagcggcggtgttgctcgcagtcttgcagctttatcccctgcatggcggtgatgaactggtaggttttgttgttgttcttaaggttaggcacaaagtctcctcccatgtaaaaggcgacattgcgcaaatagtttcaggtttctgtattgtagtatttttctgttccggagtagtgctgttctccgtattcagttccttttttacggttgtttcccgcccaggaaaagatggtgtagaaagagaatttatcgttcccggtttcaaaacttccactatgagaatttgtcaacattcccggatggacgtcattgttcagatttagcagctggtaagtctagcttctttttttgagttttatattgagcaccgttgcatatccgtctttgagatatttatgcgccaacataaaaaatgcaggaaatgttattgcgcttcctacatttttcatatttttgcatttggagagaggagttctctccaagacattttagaatttgaagaagcgttatgcttatcttgtggttgggaacctaggaaattcgcaattgtacacaaggatagcatagtggttctcacgcatatagcgtgggctgctataaccatatccgtgtacaaggttttcctaggacctccaaccagaacgtggcattgcagtctcacgcttttatgttgaatggttcccgggagagactgagggagattaattatttaaatattatgaatgcacgtcacctattcattttatgcggtacgtttttgttattcatggcctgcaaagactctcccaagcaaaagtctctttctgcctcaaagaatccaaaccacacgtatgtaattgcaataaagtcggacattagcgtcaaaaaggaatcggtggaaggcaaactggtaggggttgttgaacgtggagaaatgtgcgaactggtagattcggtcaacggatggtataaagttcggttacgtacaggtgaagagggctatgtcaacagcgaattttccaaagtgctatcccatgattctattccgaagaaggcttttgaagcgtattgtcctttggcagagcagagagtacaatacggtgccctatctttcagactggatggaaacaacgtatttatggcgaggggttataattctgtgccagaggatggaaatctttggaattcggtctaccaaggggcaacggtctattatggaaagatagaaggaaatcggctggtcttcacacgtcacttggaatcctttaggggactgctggaagacgttactccggaggagatggaggaagtaaagccttataccgcatattattcgcccgttgagggaggattcatctttgaaggggcactatttaagacttcagatgttgatggcattttgaatgcggctcccgttaataaagaaactgaaactcctcatcctttgtcggcacgtaaaggtctcggcctatatgggagcgtagaaagtctgaccaatagtgaaggggaaaccactcggtttgacaaggttgggaatatactggaaatcagtaaaggggaagaatattccctgatttataagtacaatgacaaccgtacagaatacagccgaagcgattggggctcttacaccatcacatacagcgaccataagcggagcgatatgagtaagaatgaatccgatatggaaggttctgtagaatatctttttgacgagcaggacagaatcatagaacgtaaaagtcaggtaagaatgatttacctcacagaaacattcacttacaccggtgtgaaccttcttcctgatagtaaaagtgtacacgattacgatgaaaccggagattaccttaccacagatagatatgagtatctggaagtggacgagcatgggaattggttgaagcgaaaagttacccgcaccaatcaggtgaaagagtataaggagaatggtgagtcattctctaccaaaacagaaccggaacgtatcgagacacaatcccttgagtatttcaacaactaaaaataactatttatgagtacgaaaatgaaattcaagtgtacttcatgccaacacatatttgaacatgatgcttatcaaaaggaatgtttctgtccgaagtgtggtaacatcagtgaacgttgtgcagaagaggaacagtttattgtttgtagtgaatgtggaactgaaatccctaacggtgtaacatcgtgccccacatgcgggtgccccatatctgccacgaaaaatcgccattgccatgaatgtggtgctgagctggctgattccgtatacgtttgtccgcaatgcggatgtcccgttgtaccagctacgccgattgccgcttcatctatccctccggtatccattacacagacagcatctcctatagaggttgaagagcaggaactttcccttcccccaaggagtagggctttatattggtttattggtggtattgtattggtgctgttagtaagtttcggtatattttattatacgaccgattattttaaggataagaccaacacattgaaatctgtcgtaggtacttcgcggcaagtagtgattgatggtgtcaacctacgtttacggtatgcaccatcgtcggatgcagaaacatacaagtgggctgacggaaccaaccgtcacccggagaaaggtgaacggtttccttatttaggagaagtaggagacttttataaggttgattataagggacttgtactgtatgtttccaaacaacatactcacctagaatagttttttatttattaacgctaatatattttgtattatggcactcattttttgttcccattgtggaaagcaggtttcggacaaagctaccacctgccctcattgtaatgcagtcctgcaagcaggacaacctcaggttcaacctcaaacagcccagcagccgttccagcagaacacaaatgctacgcaacagtcggtttacgtaaatgttccaggtaagcaatccaatggtatcggcactactgggctggtattcgccattcttggaatctttcttgggtggatacctattcttgggtggattatctggttcctcggtgcgctttttagtttcatcggcttattcaaaagtccgcgcggctgcgccattgcaggtttcattatctcatttatatgggtgattgtcgctgtgttcgtcgttgggtctattggagccttttcactctttagttaatggttgttatacatagaaggttctatcgtttaagaattttagataccaattaagtgatgctggcaaaaagaacaaattcactttttgccagcatattttgttacttttgtaatcaaaacaaaagaaagtagagctaaagaaatttcataattttcattctcacatttccggtgtccctttttctccggtcactttctgataaagtcgtcttcggatggaagaaatgctttccggcttgggtgcatcaaccgtgcgatgtctgtttggcggaattggagcttgataagcatacatacgtgcagttcgttttcgttgggattgtgcagtgaatgcagcttttcaaagaagttggggcagacaggagacatcagttctttcagtatttcccattcttcaggggtgatgtatgcctcgccacgagcgaagtttgcccgttcttatagtttctgctatatattggaaccaagcagatactcttggccctcctgctcctgctcgttttctatcgctttttgttgcaagatgtggttgagcaactctaagttgtcgctttcagccggttgttctctttttcacgcagttgatagttgtagagggaagtgcatccggtggatggtttccgtctgtgtcgcttgttcgatggtgagttccaaaagtttgcgataggcaacttgtttggcatagatggttcctcccttgtgacgtgatagcgtgacagatgaatttcaaaataaactttgtgatagggatgaatctcctttacagaatgtattgcacttccttgaacagatattcccgttcacttcctccttcatcctccagcacgaaccgtccgtcttgctctacacgcagcaaccgggcaaggaacttgccgttggcatcttcataagggtgcaatccccggcgacggaaaagggagcgggcataccgtgtggatatctcgtcggagtagacggcgaagtcctccatttggaggctgttgtagtagatttgtacacgtctcaggatatgggcaaggatttcataacggtcgtgctcctttccggtgatttgtttcagtgagacggggttgggagcatcactgttgaagacttcctggttgatgttgatgccgattccggcaatgctgcgcctgatatgatgtccggaaaggtcgttctctatcagtataccgcagattttcttgtctttccaataaatgtcgttcggccatttgatggtgatttcatcagaccatctgctcagttcttccttaatggcgagggaaacgatttgtgaaaggatgaactgtcggcgggcttccagaaaagaagggtagagtacaaagctgaaaagcaggttcttgccttcttcagcttcccaggtgttgccgcgctggcctttaccggcggtttggaactcggcagtcacggttgttagttcggcaacggattcttgcaactggttgcaaagctggctgaggtattggttggtcgatgccgtttcgtccaatgctaccagcgggaacgggaatgtgtcagggcagggcttcatattcggtacgcatttttttggtgaacttcttcaatacttcttccatagagtggtctatcagttgcttcaacagtttgtcgtcgacgtcaccgtcaaggaacacctggttccagtactttttgttgaagtgataggcaccttcgatggcagcatagtgctcccgcagttcgagtgcatattcggggtcgcatttcagacaaatcttgttggcgctttccaggtcgataagtgcaaacattttatccatgactttcatcacgagcgagtattcgtcgaacggaaggcattccgtgacggcctttttgctgaggcaatattcgcgggcggtttctatgtccatgatggtatttacggtttacaatttataatctacgatttacgattgaaataactctcacttatcaattgtcaattatcaaaatatgggtggatagaaggcatccttcatgtgctctatcctgaatgctcccggttcgcctacagcagttatgatgtcgaagcggacgggtgcatccaaacagaagtgcttgatataggcatcggccgctacgacaatacgtcgtattttctgccagttcacggcattctgcggctcgatgtagtccgtattgctacgggttttcacttccacaataatcagttccttatctttgtcggctacaatatccagctcaaggtgattcttccgccagttacggtcacgtatggtgtaaccgttctgttccaaatatttggcagcggcgtcttcaccggcttttccaagaatattgtgtattgccattattccggcaacttaatcatgccttcatgtcctcgtcggtagatggcagggaccttcaaggctttgcctctcatcaggggttctgcactgcgtgttgtgggtgccggagcctgaccggtgatttcctggatggcacgggcatataggaactctttatccgaaccatagtctctgtatatgtaatatccgtctcctctgccgtaagggtcgttttcatctatttcgatgtcaggtgtgaacccattttcataatctccaactcctttggcattatagctttggaaggtgatgggaaccacttcgtagacgttatttcttatggtatattctactggttccatacctacatttttaccggtagttcttttacctataagtgttacttctacatctattccctttagagaattgatgacaagttcactggctgatgctgttccgttacctacgatacaatagacgtgctgaaggtttaaggcacctgctgatagagacgtagccagattctcatagttggaatatgcaaacaattcttcctcacgtttatcattgcgttttttcattctttctttattatatctcaggcttgtgaacactttgccttcagattttgcgccggctatacaagttgctattaggttggctgatataacgtggccacctccattgtaacgtaaatccaaaattaggtccgtgatattctgacttttgaattctttgaatacatcgaataattcttggtcaaatccggcctcaaatccagaataaacaagatagccaattctgtgccctggggtttcttcttcttctgtcactttactgaaaagaataggattgcagtacatggcttcggaagatatgtctttttcttgggttcctccctctgtcttttcctctgtaattttcaggctgaaagccgaagctggtatcagtaaatctaggtaatgttgccaataattactcatggttaacttctctccgtttatttgcatgattgaggaacctcgtttaatacctgcccgtgctgccggtgaattggggtaaacaccttgtacaaagaagtagatagtgtaattatcttcgcttccaattgctcgaacgtctgctccggtaatgccgaaactgtaagtttgttctttttttacccattgagtggaacgggttgaaccgatgggattttttttctgtatgtatgaaaagagagtatattttccatccgcagtggcctttttatccaaagtattagtagtcatacttcccaatgcatcatagaagaagtcttcatagcctttgttatggtcaagattcaatgttttgtattcatcgttccagagatacatttctctcagatattcatcaacttttgcgttaatctccatatcttcagtggtttggggagcactggtccctttttgtgtaacttcaaaacttgcaggagaatagccgtctatattaatggagattctggctgtccggtcggtggtggaacttgtacttacagataatttcaaggtactttgtccttttgtgcccgaggtcgtattcagtttgcaccaatccgctccagaggtgacggaagctacccatttagctgcagcattgaagcttacagacaagtcattatcctggctgatctccagggattttccctctgtccaactttgattggttatgccggtattaagcttattatcgtcatcgtcactacatgagataaaacttatactgaacaacgcgagtagaaagaagctgagataatttacatgtttcataccttttaaatttagaactctccaaaaatacgtttttaattattaaattaaaatgtttttaagaaattctttaagtttatcggtcaaaaaaatatttcagtgccatttaagcgtttctgatataaaaattacgtaggttcgttttgtttttacagaagtaaaagtaattttgcaggaaatatgagaaagagagataaaacgtgtgcgaaagcaacgcccgaagaaccgaagcgcgagcagcgcatggtatgcctgatgagcgaggaagagcagcggattgtggatcgttatctggagaaatacaagataacgaacaagtcgcgttggctgcgggagactattctcatgtttatccataagaatatggaagaggattatcctactttgttcggtgagcacgacatgaggagatgagcattaaaaattagaaattaacaattaaaaggggatggcgttggacgatagctattatatgaagcaggcacttcaggaagcgcagaaggcaggtgaacggggagaagttcctgtaggtgcggttgtggtttgcaaggaccgtatcatagctcgtgcccataatctgacggagaccttgacagatgtcaccgcccatgccgagatgcaagccattaccgctgccgctgcatcccttggcggcaaatatctgaatgaatgtactctctatgtcacagtggaaccctgcgtgatgtgtgccggtgccattgcctgggcgcagatgggacgtctggtgtttggtgctgaagatgagaaaagagggtatcagcgctatgcctcgcaggcattgcatcccaaaacacaagtggtaaaaggaattctggcagatgaatgtgccgccctgatgaaagagttctttgccgccaagcgcaaataatctctaatcctttatccctaatccctactctttgatttcttcaaaatccacatactctccctcgtctttggagaacagtttcttgtggcgggggcgtatttcaccttcttcagcttgtacctcttcagacgattgtctattatcattgtaggagtaccctcccggctggtagttaccatttcctttttggtagggaccggagttggaggaagtacggcgtccgcccaatccgaatatgttccggatgacagtaccgataatgctgaggccaatgagcagaatggcaattatgatgatgaataaaaatcctaaaatatgaaacatgggctaatgtctttttatgtgttcgttttctgcgaacttcaatacaacaaccgtgccaaagatttgtttatttacttttccttgtaataagcgaaagtagtatataccacacgataattgcagcaaagctgcagattcccaagaagatgaggaacggaatgcagacaagcaggaaaatgaagcttgttttattgtctttccatgacagattcttgaatttgagtgagaacattggaatctccgatacaagtagccatgagaaaaggcagaccagcagcaacagataaaccggatggaagctgccgctcaccagccagtcgtgagcgcccgtcaccaatgaagcccagaacaaggcgtttgccgggacgggaagtcctacgaaagagctcgtctggcgggtatcgttgttgaacttggcaagccgcagtgcagagaatacggacaaaagaaatgcgagataggggaaaacgccggccaagctttccattgcgcccgaatagtccatttccttgaacaaggaaaatacaatcagggaaggggccactccgaaactgacatcatctgccagagaatccaaatccttgccgataatggagtgtgcgtccagtgcacgtgccatcatgccatcgaagaaatcgaatacggcactgaagataatgaaagcgagtgcccattcatatctggcttcgaatgccatgacacaagcaatacacccggagaataggttcaggcaggtcagagtatttggaatatggcgggtaatgcagtttgccattgttgttcttttattatttaagtttggctatcacagtctgattgccggtagtcagttgtcctagtttaacgaatacttcggtgcccaacggtagaaagacatccacgcgggagccgaatttgatgaaacccatatgttcgtcaatatagcattcctcgcccggttcggcataggtcacgatgcggcgcgccatggctccggctatctgtcgtgccataatctccacgccttccggagtttctattactacggtggaacgctcgttgtcggtgctggctttgggcagccaggctttcatgaacttcccgtttttgtgccataccttctttaccgtaccatctaccggataccagttggcgtgtacattaaccagactcatgaatatagataccatgatacggcggtcgtggaagtattcgttttcctccacttcttccaccactacgattttaccgtcggcaggagctaccacgactttctccgtttcttgtccgaacaaacggatggggcagcggaagaagttcacgagtatgccatatactatgaggctgatgaccgctactacgtaaaaaggaactttgcattccaatccgaagtaaagggcagtgttgacagccagaatcagaaccaggctgcctgccaatgtatgtgttccttcacggtgtatgcgtatcttttttaatctttttaatcgacccatgtatatcgtatttgctaatttagatagaaattatctgcaaaaataggcttattttgaaaatctaacaaggatttggagagagaaatgtgcatgttgataactttttgggaaatatttttgttagctgtgatagaggttgtaattttaggctctcaatagaaaggatatatatgcaagattttgttcatttacatgtccatacccaatactctcttctggatggtcaggcaagtgtcagcaggctggttgacaaggccatgaaggatggtatgaaaggcattgccgtgaccgaccatggaaatatgttcggtatcaaggagttcaccaactatgtcaacaagaagaacagcgggccaaagggggagataaaggacctcaagaaaaggattgccggtattgaaagcggtgagatagagtgtgaagacaaggaagcggagattgccgattgtcgtgccaagatggcagaagcggaaagcaagctgttcaagccgattgtaggctgtgaaatgtatgtggcccgccgaaccatggataagaaggaggggaagccggaccagagtggctatcacctgattgtgctggcaaagaatgagaaggggtatcacaatctgataaaacttgtatcgcatgcctggacaaggggatactatatgcgtccgcgtacagaccgcagtgaactggaaaagtaccatgaggggctgattgtctgctcggcttgtatcggtggcgaggttcctaagaagattatcaatgaccagctggaagaggcagaagaagctgtacgctggtataagaatctgtttggcgatgattactatctggagcttcagcgccataaagccactgttccccgtgccaaccacgaagcctatccgcttcagcagaaggcgaatgccaagttgctggagcttgcccggaaatatgacattaaggttatctgctccaatgacgtccactttgtggatgaagagaatgcagaagcgcacgaccgcctgatttgtctgagcacgggtaaagatctggatgaccctacccgaatgctttataccaagcaggaatggatgaagacaaaggctgagatgaacgccttgtttgaggatgttcccgaagccttgtccaataccttggagattttggacaaggtggaatattattccatcgaccacgctcctattatgcctacgtttgctattccggaagatttcggaacggaagagggctatcggcagaaatataccgaaaaggatttgtttgatgagtttacccaggatgaaaacggcaaggtggtgctggatgaggatgccgccaatgccaagataaagcgtctggggggctacgacaagctgtaccgtatcaagctggaagccgactatctggcaaaattggcattcgacggtgctaaaaaactgtacggtgatcccttgtccgacgaggtgaaggaacgtctggtctttgagctgtacatcatgaagacgatgggtttcccgggatacttcttgattgtgcaggactttatcaatgccgcccgcacacagttgggcgtttcggtaggaccgggacgtggttcggctgccggctcggcggtggcctattgcttgggcatcacgaaaatagacccgattcaatacgaccttctgttcgagcgtttcttgaatcccgaccgtatctctttgcctgatatcgatgtggacttcgatgatgacgggcgtggagaagtgctccgctgggtgacggagaagtacgggcaagagaaggtggcgcacatcattacatatggcacgatggcgaccaagatggccatcaaggacgtggcgcgcgtgcagaaactgcctttgagcgaatcggaccgtctgtgcaagctcgtgccggataagattcccgacaagaaactcaacctgcccaatgccattgcctacgtgcccgaattgcaggctgcggaggcttcgcccgatcccctggtgcgcgatacgatgaaatatgccaagatgctggaaggtaatgtacgcggtacgggtgtgcatgcctgcggtactattatttgccgtgacgacatcacggattgggtacccgtcagcacggcggatgataaggagacgggcgagaagatgctcgttacccaatacgaaggttccgtcatcgaagatacgggacttatcaagatggacttcctcggactgaaaaccttgtccatcattaaggaagccgttgccaatgtacgtctgcaccgcggcttggaactcgacatcgacaagatatccatttccgaccctgctacctataaactctattgcgacggccgcaccatcggtacgttccagtttgaatcggccggtatgcagaaatatctgcgtgagttgcaaccgagcactttcgaggacttgattgccatgaacgccctctaccgtccgggacctatggattatatccccgacttcatcgaccgtaagtggggacgcaagcccatcgagtatgacatccccatcatggagaagtatctgaaggatacctacggcattacggtctaccaggagcaggtcatgcttctgtcgcgtttgctggcagacttcacccgtggtgagtccgatgccttacgtaaggcgatgggtaagaaactgcgtgacaagctggaccacatgaagccgaaattcatttcgggtggacaaaagaacggccacgacccgaaagtgcttgagaaaatctgggccgactgggaaaagtttgcgtcctatgccttcaacaagtcacatgccacttgctattcgtgggtggcctatcagacggctttcctcaaggccaactatccggccgaatacatggcggcggtcatgagccgaagtttggcgaatattaccgatataaccaaactgatggatgaatgcaaggcaatgggcatcaatacattggggccggatgtgaatgaaagtaacctgaagttcaccgtgaacaaggaaggcaatatccgttttggtcttggcgcggtgaaaggggtaggcgagggtgctgtgcagagcatcatggaggaacgcgagaagaatggtcctttcaagggtatatttgattttgtgcagcgtgtcaatctgacagcctgcaacaagaagaatctggaatgtcttgctttggcgggcgggttcgacagcttcccggagctgaagcgagagcagtattttgccgtaaattccaagaacgaggtcttcctcgaaaccttggtgcggtatggtaaccgttaccaggccgaccaggctgcggctgcaaactccttgttcggcggtgagaatgtggtggatatcgccactccggaaataccggtagcggaacgttggagcgacctcgaccgtttgaaccgggagcgcgatttggtaggtatctatctgtccgcacacccgttggatgagtattccgtagttctggagcatgtttgcaacactcacatggcagagctggaagataagacggcacttgtgggacgcgaaataacaatgggtggcatcgtgaccgccgtgcgtcgcggtatcagtaaaaatggaaatccttacggcatagccaagattgaagactattccggttcggcagagcttcctttcttcggaaatgattgggtgacctatcaggggtatctgggtgaacgtaccttcttgttcatcaaagcccgttgccagcccaagcaatggcggcaggatgagttggagctgaagataacctccatggaactgttgcctgacgtcaaggagaaactgattgagaagataaccattctcattccgctgagtgtgctgaacaaggctttgataactgaactggcagaactgaccaaggaacgtccgggcagtacggagctttatttcaaagtcagagatgaggatagcaagatgacggtcgatttgatttcccgtcccgtgaagctttccgtggggcgtgaactgattacttatttaaaagagcgtccagaccttgagttcaggattaattagttatctttgttggaaaacgaagataggctgcacctcggcataaaaaatgaacaagttcattttgttttgcattcggtttgcactatctttgcttcgaaagcgaaggttgataaaacgcaattgacagtaaattaataattatagttgacatttaatattaaaagaaatggctttagaaattacagacagcaattttcaagaaatcctggcagagggaaagccggtcgttatggatttctgggcaccttggtgcggcccttgtaagatggtgggaccaatcatcgatgaattggctactgaatatgaaggaaaggtgattattggcaaatgtgacgtggatgagaacggtgatgtggctgccgaatatggcatacgcaacatccctacagtcttgttcttcaagaatggagagctggtggacaagcaggtaggttctgctccgaaatctgcttacgtggccaagatagaagcgatattataaggtactatttgacgatttactatttacgatttacccttttggcatcatggcgccgccaaatagtaaatagtaaatcgtcaaatagtcaataacattaaccctttaagcaatagtaagtatgggaatggaagacgattttttgcagaatgatgtcgatgatgaaaagaccatcgagtacatcaagaattatttgccgcaggagttgaaagagaagttctctgacgacgagttctattattttctcgatttgattgacgagtactattccgagagcggcatccttgatgcacagccggatgcggatgggtacatcgagattgatttggggaaaatcgtggactatattgtcaaggaagcccataaggatgagatgggtgactatgatccggaagaaatccttttcatcgtacaaggtgagatggaatatacggaatctttggacgaagaatagtctgtatcaaaagtataggaaaatcgcggatgggcatggcttcatccgcgattttttgtttttatgtgaccggtggcgtattcagaaaaaagaagatggacgtgccgatgagaatgacacccaatacaccgtagaacaggcgggcttgtcgccgccctacattttgtacgataaactgggtgtttcgggcagtaaagaaccagttccagtccaatatggctgccagcaaggcgatgatgcctgcgacggcgaaaatcccttgaacgatgtattggctcatcagaaataagaattaagaattaaaaattaaagcgggggaaaagcatgccttattcaaagctctctaacgtgacttcccgctctccgttctccacttcttcgatggtgaccttgatggtgttgcccggcaagagttcctctaccagctccggccattctatgaagcagagggcgccgctgtagaagtaatcttcgtaacccatgtcatacacttcttccagtttcttgatgcggtagaagtcgaaatggtaaatcagttcgccggcagtgtcggaacggtattcgttgacaatggcgaaggtaggggaggtgatgacgtcggaaacgcccaactcctcgcaaacggctttgatgaaagttgtcttgcccgcccccatttttccgtaaagagcgaagacggtattatcacccatttcagcgatgaactggcgggcggcttcgtgaatctggtctaatgactgaattttgatttccattgtgtcttttgatttagcgttgcaaatatagccaaaaactttttcctgtcttgcaaatggcatagataatgatggaaaagaatatgatggatgcacccgaggggacattcaagtagaaagaaatcatcagcccgcccaggcaactgaggtaaccgatgccgatggaaagccagatgatgcggtggaaccggtgcgagaacaagttggcggtcatctgcggaacggtgagcagcgaaatgaccagcacgatgcccaccatgcgcaggcatgccacgatggtcagcgcaatgaacatcatcagtacatattcgaatacctgcaccggaataccttgcgagcgggcaaactcccggtcgaaggctacgtagatgatgggatggagatacagcgcgaaaaacagtatcagcagcagggcaagccctcccaatagagcgatgtcgctccaggtaatcgtgagaatgttgccgaagagataggcggacaagtcgggtgcgaatcccggcgagaggaaagtgaacatgatgcccagtgccatgcccaatgtccagaatacggcaatggcggagtcttcccgcatgtccttccgtttgctgagccactctacaccgaaagcggacaagactgcaaacaaggctgccgacagaatgggggaaatgccggtatacaatcccaggccgataccgccaaaagatgcatgcgtcaatccgccgctgatgaacactagtctccgggtaacgatgtacgtgcctatcagcccgcaagcaatgcttgccagcagactgccgatgagggcatgttggaaaaaagtgtattgcagtagctccatttattcaattaaaaattaagaattaaaaattaaaagttggatgtggagtgttaggaatggggggtgagacggcgttcgccgatgatgaggaacacttcatccttgatgttgtccggcaaggctatgccacgcagttgcaggctgcgcacccatccggctacgtccgtgtcttgcatggtgtagaacacgtcgcggaactcgtcttcctgctcgggagtataggcatcgggagcggtgccgatgtatttgtccagttcttcgtcatcgtaatattctatttgcttgctgacggctgccagcaggctgtcacgttcgcagatttcatgctgtccgcagcactcggcatccacttcctgcacttcgggcatggcgtccagttcgccgcggtctatcttcttctgcagtttccggttgcgtataattccggctgtggctgccacgagggcaagggcaatcaggctaataatcaatatccacatgggcttccttttcttgaaaaacatgttccattaatagaacggacaaagatacatattgttttgtacacgacaaaataatgagtcagattgcaggtaggcagattacttccacccgacgcaggcattacttgcttggaacgtagtgtaaaactactttggatacatcctaatcttagaatgtatcctttatttctaagaataaaggttatattcttaagaataaaggctgtatttctaagaataaaagctttattctaagattgcattgcattttggcagactttaaatcccgccttttgcaagtcttcccagtaagcagggtaagatttggtaacgacctgtggttcatctatctgtatttggggcagtacaaggcaggcgggggcaaatgccatggccatacggtggtcttcgtaggtggcgatgacggggtcagcgtctgccgggcagcgtttgccatcccacaacaagatgctgtcttgctcggagcgcacgacgtaacccagtttacgcagttccgtaatgagggcggtgatacggtcggtctcctttattttaaggctttgcagtccggtgaagcggaaagggatgtccatcaggcagcaggtgacgacaaaggtctgcgccaggtccgggatgtccaccatgtcttcgtcgagacgggtggcgggagtacccttacggatcagttttactccccggtctgtatattcggtatggacgccgaggcgggcaaagacttccgcgccgcggctgtcgccttgatagctgtgggcgaagagaccgagcagttcgatttctgccgtgtgcgcttcttccttcgtgctgtcttcactttctttcgcgctacttctgtctccccctttcatttttattttttcatttttaattccttctattgccatcatctgataccagtaagaggcggcgctccaatcgctttccacggtgaaaggagtatctgtgtatccgccggggctgacggtgatacaatctttggaggcccagtcggcttgggcaccgaagtcgcgcatcagttgcagggtcaggttgatgtaagggcgggagatgatgtcgcccgttaggtgcaggcgtaatccttgggggagtacggcgccaatcatcagcagggcggatatatattgggaacttacatttccggcaagggatatttcttcgcctttcaatgctgtgccggtgatgcgtagtggggggaaaccttcgttcccgacgtattcaatctgagcaccgagttcgcgcaaggcgtctaccagtatgcggatggggcgttgctgcatgcgttgcgtaccggtgatgattcgggtgccaggagttacgctgaggtaggcggtgaggaaacgcatggcggtgccggcggcaaggatatctatatgtccgggatttccgtcgagggcgcgagtcatcactatggtgtcgtcacaatcgctcagattgcggggcaggatattgccgtgggcaagggagtggaggatgagtgcccggttactgatacttttggatgccgggagctgtatggctgcgtgcagtgaggcaggagcggaaacggtatatcgcatggtcgtatttgttaagttacggtggtaaggagtttttttattgtcactgcaaaagtaggataaatctttgggaaatggaaaaaaggaaacttgtttctgtggtttcaatctttcgttctctttgcggaggtaagtcctgctatcgggacggatagatataattaagcatcattcttatggaaatagatttaaccacccccgccttgctgttttcggccatatcgctgattatgctggcctataccaaccgtttcttgtcctatgcccaactggtgcgcaccttgaaggaacagtacatggagaacccgtcttcggtgaaggcggcgcagattgccaacctgaggaagcggctctacctgacgcgtgccatgcaggtggcgggcatcggcagcctgctgctgtgcgtggtcagcatgttctttgtctatatccgtctccatctgctttcggcctatatcttcggtttggcgctgatattgctgattatttcgctggccatatcggtgtacgaaatatatatatcggtgaagtctttggagatacatctcaacgatatgcacgagtagaggctctacgggatgatgttccgtacggggagttccagttctccccagtcaatcatggcattgaacagcctgacagtagagaatgaaggcaagtcttccggtctgatgtctttttcctgcaagattccttcttccagcaaggctgcccgtttggttcctttcagcaggggatgtgccggcgtgtaccagtgggtgccgtcggaaagggcgatgttggcgatggaggtgtctgtcagcaggccttgtttcacaatcagaatgtcgtcgcatgcgtcgcgcagggcaaagaggcggttcagcggttcgcgtccggcgcttttgtaggtgtagtcgatgtggtctgcctgtatcagtgccagcgaatgcacgtgccgcatggtgtagggggagtagctgacatcttcaatacctttctcaccatacactacgcgtgccttgacgatacctgcctcgcagccgagagacgacaaatggtcacgcagttgtagcggtgtactttccggccagaagtgggcgcgggtatcgttcagcctccgattgtggcgggaaaggttgcaggcttttccgtggtcgatgcgtatggtttcaataaataggcacatatattttctgtattacttcgttgtattcgctttcccaccggcttttggcggtgatgccgcctcctgccttgaagtggagccggccgttttcctgctcgatgaagcgtatcatgactgcgctgtccagctgtccatcggcataatgccccatgatgccggtgtagaagccccgttcgtaatcttcggcttcggcaatgatttccacggttttgggcttgggggcaccggtgatggaaccggcgggaagcaggcggaagaggatgtcgccgatgtgtgcggtataatcttcggggagggtcccgcatatttcggagctggtctggaggatggggcctttgttggtttgcaggcggtctatgtatcggtaggaggttacctctacgtgctctgataccatacttaggtcgttgcgtatcaggtcgacgatggtggcgtgctcggcggcctctttggcatcctgcatcaaaagctgttccgcatcaggcagggtagcgtcgatggtgcctttcatggggaaggactttatcttgcccttctctatgcggacaaagatttcgggggagaagcagacgaatcggtctttcagccacagcttgtacaaggcttcggagtggaggaatatttcgtccattgtcagattggtgctgacgggcacccggcaggtgaggtttgtcaagtagctgttgcccgccagtagattttgcttcacgaggtcaaacgagtgtttgtatgcggcgggggaagggggagtgatgtcccactgaataagaccggcgtatcgggcggctgttgcagctacccccacgttgcctgccttcgggaattggaaaaggcaagtggcgggatttatctggtcgaggggctctacgtgcgactgctcttgtgcgtagtctacgatgaagaggaagggcacattgtccccggccagtgcgttcatgcgggcgatagcttctgttcggttgtaagttttcatatatcagtagactgcagaggatatcacctggattatcagaatgaggaataccattgcaatgggatataccgtggcataggctacgctcggtatgttgctgtccgtcatggagtcggcggcggcaaggccgggcgtgctggtcatgccaccggtgatggtgcccagcaggtcgagaatgtttatcttgaatacgaacagtccgacgatgacggccaccagcatgggtaccagcgtgatggcggcacctacgccgaacaagagccagccgctttcctggaatgtggctaccaggttccgtcctgccgaggttcccacttcggccaggaagagcagcagtcccagctggcgcagcagttggttggctgggccggacatagaccacagaatgggaccggtctttccgatggcactgaggaagagggccaccatgaggatgcctcccgtcagtcccggtgagaacgacagactgtccgagaaggagatgttcagcttgccgaagagcacgcccagcacgatacccagggcgatgggaaagaagtcggtgtcggacagttgcttgttgtcgttgcccagcaggcgtgccacgcctttaataccgtctttctcgcctaccaccatcagcttgtcgccgaacttcagtgccagatctggcgagggggagaggtcgataccgcttcggcggacgcgggtgacggtacagccgaagttcttcatcaggttgaggtcgcccagttgtttgtttatcatgtccttcttggtgagcagtagagattcaatctcctgcatgtctacgagtggcagttcgccttcttcgcgctggcccacgaggacggcgagctggttcaaggcctcttcgctgcccacggcttgtatgtagtctccctcgtgaagtatggtctgggcggtggggatggctatctgctcattgtgcttatggcgtgagatgacagctccggtcatggcgcgcgcattgatttgcatcaggctccggtcgaagacggcggggttggttacacggaacaggcaggttgtcagttccgggaactggctgcggcgttccttctccagtcggcgcgcctccttgtcgaggtcgatgcgcataatgcggggcagcagcttgacgaagaggatgacgccgatgacaccgaagggataggcgataccgtaggcgatggaggctagcggagagtgggtgctgtcgatggctacggcgagtcccggcgtactggtcagcgcgccggctatgagaccgaccacgctgggtgtgtctatatcgaaagcgtacttcaatcctacggctgtgagggcggcagaacagatgatgagcagggtgatgacgataagtgtcttgcccttgctccggaaggagtcgaagaatccgggaccggcctggataccgatggtgaagataaacagcaccagtccgaagttgcctaactctttggggatgatgacgccgaagtgtccgaacagcagggcaatgaagatgacagcggagacgtcgagtgaaagccctttaatcttgattcttcccaacatgaagcctaaagccacaataagaaagagcgcgaaataggaggagtttaacaagtcagcaaacataatcagttaaagagttaggagtttatgccacaaagatagtgcaaaaaagtgagatagaaaaaggcattgttttcttgtggtatatattaaggagttaaaccacggtttaactccttaatatatattggcctatatggccggtattcctgcgtggggcagggcggtacttatttttcgagttccttcagcagttcctctacggcagctttcagttgtgtgtcttctcccttcacgatggtctcgggtgaattggctaccttgatgtccggctccagctgcgagttctccagatagctgccgtctggtaggcggtagcctacgacggggatgccgaataccaatgacgggtcttgcaggcgctcccacgacacgctggtcatggttcccggcacgggcatacctaccagcttgccgatgccgcggtggctgtatacccacggcgtgccgtgcgcattggagtagttggcctcgcacatcaccatgatggagggtttgttccagcggcggctgggcatgtcgcacgcctcgcggccgcgcaccacctgggtgaagtatttctgtccgctgaaaagtatttctatatcctcgtgcaagcgtccgccgccattgaaacgggtgtcgatgacgatgccttcgcggttgttgtacttgcccaggatgtccgagtagacagaacggaaactgtcgtctcccatagactcaatgtgcacgtaacccaatcggccacccgaccatcggtcaacgtctgccgcgcgctgtttcacccagcggctgtagagtaaatcgctgaacgcaccgttcgtaatggggataatgacctcttcccagtgctccttggtctgcgggtcgaagagagaaacaagtgttttcttccgtgccttgttgttgagcagcgtgtaatagtccgcatcgggggtgatttccacgccgtctatcttttcgatgactgtgccggctttcacccgggtgttggctgtgtcgaaggggcctttctctactacttcggcaatgagcatgccccggcccgtgtagttccagtcgaagaacagtcccagactggcagtaggctcggactgccctttgggatagaaacggccgccggtgtgagatacgttcagctcgcccagccattcgctcagcagttcggcaaagtcataattgttgtcgatatggggcaggaagcggcgataggcggcggtcatcttctcccagtccactccgtgcatattggtattgtagaatcgcttctgctgctggcggtacacgtggtcgaacatgtattcgcgctccgcagccaaatccatcttggcatctacctggaaggtgatgggggtcagcgcatcggatgaagtgtccattttctgcatcttacggctgcccagcaggaagaggtttttaccgtccttgtccagctgcatgtctgcccatccggcatccatcttgtgcagcagtttggtttccttcttgcggaggttcatcttccagaggtcgtagccaccttcgaaggctgccaggtagtagagtgtctcgccatccttggagatgatggtgctgcccatgtcggaagagttcggggtgaggcgcaccacacggtcttcgatgcctttcagctctacgacgatgtctttcggctggtcatctttttcgtcagcattgctgtctttcttgtcgtctttcttctttttatccttgtttttgccttggggggtgtccttcccggcagacttcttctgctccttctccagctccttgtgcagctcgtagtcttctttgctcagacagtatttgtcgtaggcgtcttggttgaggaagacgagcatggcgtcgttcagcgagccccatgaggcgtgggcacgcatgccgtagcgttcggtggtgaagaggatggcgttgccgtccagcgcaaagcggggatagccgctcatgtagccgctattggtgaggttgatgatgtctttgcctccctctgcgttgaccaggccgatgtcggagtaggggtcgtgcttgttgccggtgaactcaagtgtaaaccacttgccgtccggcgaccatgcgtagtcaaatcctccgccggtgctgtaccaggtggagccgtccgtaatctggcgcaccttcttcgtttccagattgagcaccatcagccggatgcggtcttcgataaaggcgagttccttaccgtcgggcgagaattgcggataggcacgttccacggtggtggagggcagcagcacttcttcttcaatcagcgtggcgttcgggaagttagggtcttccttgcggactatcttggcaaggtagagctgccagttgccgcctcgctcgctggcgtaggccagggtgcggttgtctggcgcaaaggagaggcccgcttcgcgtgccggtgtgtgtgtcacctgcttggtagtggcatagtctgccgaagtgacaaagacttcgccgcgcagcgtgaaggcaatctgctttccgtccggggacacaacggcagaagtggctccgtcggaagactgcaggttggcgaattgcggccggtcatcgcgcacaatttctatggcgactttcttcggggtggcatccggctgctgggtatagatttcgccgtcgtaaccgtagcacaacgtcccgccgtcactcatggagagaaagcgcacgggatgtgtcttgaagctggtgatgggcttcacctctcggggctgtgccagcgggaaggcatacacgttgaatgagccgccgtttctctcactcagaaagtaaaccgttcttccatcgggtgacaacaccgggttgcggtcttcgcccgcgcggtcggtgaggttggtatggatacccgtctttgcatcatacagccagatgtcgcgggtgatggaggaggtgtggtgctttctccattcatcttcaaatcccttgcggtcttggtagaggaactgctggcccgccttgtcgaagcagaccgcttcggcaggggtgcccagcacttgttccgtacgccctcccgttgcaggtactttgtaaagctcggtcatggccgacgtggggaaaagagcgctgcttgccgggtcctggatggaggcggaaaacaagatatactttccgtccggagtgaatgtggagggtatctcaccggtggagtgggtagtgagccgttgggcggttccgccgtctgccggcatcacgaatacgtcgaagttgccgtatctgtcgctggcaaaggcaatctgtttgccgtccggcgaccatatgggggtacattcgtagctctcttgggtagtaagctgtgtggcggttccacctttggcaggcaccttgtagatgtctcctttgtagcagaatgcgatttccgtaccgtcgggagaaatttgcacatcgcgcatccagagcggcgtggcggcatgtccggcaatggcagtaaggcctagtgcaaggattgcaagggttttcttcataaatgtgtgggttgatgttaatatagaatgtttataaacgtcatgatgctgtccacaaggcaaggcacgaggtatgtcatttcatacctcgtgccttgtatatctgttctttggcattgttgatgctttggaacttctcttctgcggctttcttgatgtcttcgcccagcgttgccacccggtcgggatggtgtttcaaggctaggcggcggtaagcggcacgcacttcgtcattggtggcggtaggttcaatttcaagtactttataggcctcgttcagtgagctgccgcccaggttgagcatggattccacttccttgacggatagtcccatgtacatggccacttctttcaaggcttctatctcctcgttgcagacgtgtccgtcgcttttggcaatttctaccaagaataccagcagttgcaagcgttcctcgtatgtcaggttggcggcaatctgcgttccacagtcacggatggtgtttttaaatgccagtgggttttgtctgtccatctgcttgcgctgttcgaagaggttgagcagtattcgttctccctcgcccacggcagcctcaccgaatgtgcttctcagaaagcggcggacgaattccatttcactatgcatgatgcgcccgtctgcacggataatgtacgaagccatcacgagcatggagaagaggaaactgttccgttgcccggtataggtagtgccgcgcgttggttcttctccataataactgcctgcgtcatttgaatcggtgtcgaacagtgaaccgaatacaaaacctgccaaggctcccagcggtcctccggccatgaaaccgatgatgccgcctatccatttagctgctcccataatttttcttgtttaaagtgcaaaaatagagatttcttacgagaattccagtaatttgatgggctattcccactgaagcgaatagcaccgtcttctttttgtacatattcagcatattcatggcagcaagtctgtcattaagaaatactataaaaattaaggagttaagtcttagacttaactccttaatgctcaacagtcgggatgacaagattcgaacttgcgaccacacgccccccagacgcgtactctaccgggctgagctacatcccgaattgcgggtgcaaatgtacggctttattttaaaatagcaaatatttatagtgctttttttattgaatgaacctatattttgcagtttcaaggctttcggccaacgtgccctactctctttttacttgtatgcctgcttcgcaaggcaatggctttgagcgggcaggcatactttgaatgaagttattgcaggtttaggctatttcttacggaagtgacagccggactttcgggcgttacggatttccgggtacaataatcgaattccgcagacttttcgccgctgaatgatttccatttcagtttcaatttaacggtcttgccttctgtatcaggcagggcatccaacttgaaagcaaccagaccgtccgcatacctgccgtaaatatcgcccttggcattgtggcggaattctacttcatacgggttttccggattctcgctcagcagcagattgacaaagtgctttgtttgatagtctccttgctgagttctaaagcgaagggttagataaccgtcttctgcaatggtcacccaatcgttcacaatttccaccgggtcggtgccgtatacggtatcgttctcttcacccaaatccggggcgatgggtttggtaaggatactgtctatccagtttatatgtacagcttgggtgtagatatcgctgggctcgtccacttccttgtagtttaccaaagcgcggacttccttttcgccatagggagatttcgtcatgttggtaggcagcagagtggtcttgtcatccaattgcagaaagactgtctggtctgcatcggtctttaccgttaccagggcattggggaatctcatggcataattatcatcgtcgtccaggcatgattggaggcttaaggaactgatggttgcaatagcgattaaaattttcttgttaaagattgactttattttcatagtgtactcttttaaattaaacattcggaataggcttcacttttataaaaatagcatatttgcgaaaaccctgcatgcggcattgttaattaatgataagagccggagtaagctggtgcggaacattattccccgatacatgaaagatatttgtatatcaggtggaatatgattatctttgctgtatgagatgcacatctcgcgtgtgttgagatgtatgtctcgaactgcatgagatgtgcatctcgtgcatgttggggaatagctgtccggccgtatggaaactggctttctgttgaggggaagtaaacttcgggtggggtgtcggcagtctggttgcagtaagaaacattatgttcattgtgaaaagagtatgagtatagtctatttggttcgaaagaaggttttccgcacggcggaaggggtgaagcaactctattatgctgtgcagcgtgtgttacagcggcgtggaggtgtgacggcagagctgctggcgcagcgtatggcatccagaaaagggatgagttcgggagacgtgcagagtgtattgatagatttgccgaagtttatagaggaagcgctgatggagggagagtcggtgaccattaaggggctgggttccttccatgtggcggtgacgagtgacgggtttgagcatcccgacgatgtgatgccgggcaaggtgcgcttatctcgtgtctattttcgtccggataagtcgctggtggcgaggctgaacagcgggatggatttctaccgttatccgcttagccgatatttccttcacgatatgttgcggccggaaacgctgcgaaaggagcgggccgagggaaagacgggaattccggatgaagacccggttgggatggaaaatgatacggaggacttttcgggggaggagtgagcgatgaatgtggaagaattcagagaatactgtctctccttgccgggagtgctatgctcccatgcactccctataaaagtcgaacatctcgaagatagtatccttgtctgccgtctggttgagacagatgttacccacttctttcaatagggtgaagttgatgactccggcggtattcttcttgtcatgcttcatcagttcgtacagctggtcgtactgtttgcagttgaaggagaagctgccataattctctttgacgaattggatggtctggcgcatcttgtccttcgggaatccggtctttatataagaaaggtatagttcgcagaccagcccccatgccactgcatagccgtgcagcaccggacggttttcggcaagggcgaggctttcgaaggcgtgtcccacggtgtgccccaggttcagggctttgcggatgccatgttcctgcgggtcttcttctacgatgtgttcctttacctgcacggaacgtcctaccatggacttcagcaaggcataatctatcttctccgtatcgaaggccagcagttccgccagatgttccggggtactgatgaggccgtgcttcagcatctccgcatagccggagaagaagttatgggcatcgaggctgcgcaggaactcggtttccagcagcacgcaggcggcaggagcaaagacgccaatttcattcttcagaccgttgaagttgatgcccgtcttgcctcccacggaagcgtcgaccatggcgagcagcgtagtgggaacgttgatgtaggcgatgccccgcttgaaggtggaagcggcaaaaccgccaaggtcggtcaccatgccaccgcccaggttgatgagcagggagtggcggctggcccctttctcactcagggcttgccatacggcagccagcgtttccagattcttgtgtacgtcttctgcaccgataataatttcttccgcttcttccaaggcggggataccgtccagatgcgggcggcagaggcggtgggtatgctcgtcggtaaggatgaaaagcttgtcatggggacacttcgctatggcatgcgtcaggctgtttgccagtccttcgcaaaggattacttcttgtttactcatcttgttaattacaaattacgaattaccaattactgatgttacggattatgaaggaaagggggccttcttcattatattgtggcacaaagatagctcttttggcaataaaacgttatctttgtcccgtgaaattctatgggtggcaaggcgtttccgtcatctgcctcccactatttgtaattagtaatttgtaattgattgatagaaatgagagcattacttcccgtttattgccgtccgctgggttatttcatcatagctttggcgttgttcctccctttcatattcctattgtggggaaaagtgacagatgccaacttgctgttttacaaggaatgctccaaactcctgatgatgatgggggcactgatgataatctttgccttaacgaagaacgagaataaggagatagagcaggtgcgcaacaaggccacgcgcaatgccatctttctgaccgttctttttatcttcggcggtatgctctaccgggtggcgcagggtgacctcctttcggtcgattcttcttcttttctcatatttcttatattgaatgtgctttgcttggaatttggtataaagaaagcgacagttgatagattatttaagcggaatagtcgataaacggagcaaatcgtcatgtggggcattaaaccttttgcccggaagtctgtcaaatgaaacagtgaataaaaggcattgttcatttaagaatagacaaagaatagacacatgaagaaaattatcacggggatggcgttgctgttggtaacaacgctgtctgcattctcacagaccaaaaacattacggtatcgggccgtgtcgtggaggacaccaaggagcctgcgatacaagctaccgtgcagttgcttttgttgccagacagtgttcaggcatcgggtacggctactacggcacaaggttatttcactcttcccaaagtcagtgcgggtaaatacgtgctgaaggtttcttatatcggattcaagagccggtacatccctttacatctttatgccacgacaaccgccaagaacgtgggtaccctgacactggaaacggatgcggtgatgctggccgaggctgtggttacggcagaagcgccgcaagtgcaggtggtggaagatacattggtctataattcctctgcttatcgtacccccgagggagccatgctcgaagagctggtgaagaagttgcccggtgcggagattgatgacgaggggaatgtgaaaatcaacggtaaggacttgtcgaagattatggtcgacgggaaggagttctttggtggagacgtaaagaccggtttgaagaatctgccggtagatatgatagagaagctgaaaacctacgacaagaagtccgatttggcacgtatcaccggtattgacgacggtgaggaggagacggtgctcgacctgaccgtaaagaaaggcatgaaccaggggtggttcggtaatgccgatgtggccggaggtacggaagaccgctacatgggacgtgttatgctgaaccgtcttgttgaaaatactcaagttactcttattggctctgccaataacgtgaacgaccaaggcttttcaggcggtggcggtcctccgcgctggcgcaggaacaacggacttactgcaacgaaaatgctgggtgtaaacttcgctacccagaccgataaactggaactgggtggtagtgcacgctacaactatcaggatggggacattgcaagcattggctctaccgaggactttctgccggacggcaactcttactccaactcgaacagcaagcaacgtaacaaagccaagaatttcaatgccgatttccgtatggagtggaagccggattcgatgacgaatattattttccgccccaacttctcgtatggtaaaacggacaatctctccaattctgagaacggtacgttcaattccgacccttacagtctggtgagcgaccccaataactggctgaatctggagaagattctcaatccggacgatgacccgttgagaagtatccgtataaatgccatcaatagcggttcgctgagtgacaataagagtgtgtctacggatgcaaccttgcagttgaacagaaagctgaatgacaaaggacgcaatgtcacgttccgtggaaggttcggttataccaatactgacaacaaccagtatacggagtcggaaacgcactacttccagttgttgaatgctttgggaggagactccatcttggtacgtaaccagtacatcactactcctaccaagaactacaattacagtgcacagctgacttacagcgaaccgatagcccgtgccactttcctgcaattcagctatcagttccagtacaagtacagtgagagtgacaagacgacgtacgatttgcagggctttccggattggggattgtcaacccagcttcccacgggatatgaagagcatgcggtggacagtctgggtaagtatgcggaatatcgctactacaaccacgatgcatccgtgtccttgcgctttatccgcgagaagtatcagctgagcgcaggtatgtcgttccagccgcaacattctgtgttgtcctataaacgtggcgactatatgattgataccacccgcaatgtgttcaacttcgctccgaacctggacttgcgcctccgtttctccaaagtgagccagctgcgtataacataccgcgggcgtagcagccaaccgagtatggagaatctgttgccgattgtggacaactccaatccgcagaatgtgcgtatcggtaatccgggcttgaagccttccttcacgcacagcatgagatttttctataatacgtataatgccgaaaagcaacgcggtattatgtcgcatgtcaatttctcggcaacgcagaatagcatcagcaacagccgtgtgtacaattcagaaaccggtggatggactacaactccgaagaatatcaacggtaattggaatgcgttcggcttgttcggcttcaatacagcgctgcccaataagaagtacaccatcagttctttctccaatgccagatatcagaacaatgtggcttatctgacgtccggtaagggagcagatgccgtggaacggaagaatacgaccaccaacctgacgctgggcgaacgtctgaatgccgcctatcgtaacgactggtttgaattcggcttgaacggaagcatctcctattcaatagagaaggataaactgacgcctgacaataaccaggagccctataccttctcctacggtgccaatacgcagatttccatgccgtggaacatgacgctctctaccaacattgccaatcagagccgtcgcggatatacggacagtagtatgaaccgtaatgagcttatctggaatgcgcagttgtcgcagacttttctgaaaggaaatgccactgtcagcttcgagatgtacgacattctgaagaagcagagcaacatcagtcgttcgctgactgcaagcggtcgctcggtgtacgaatataacggcgtgaacagctattgcatgcttcacttcatctatcgtctgaatattttcggcagcaaggccgcacgcgacaagatgcagggtcgacgtggcttcggtggtccgggctttggtccggggcatggtcctggccgtttcggagggcataggccgttctaaaatccttttctgtataaggtttgtaaaagacacagaggcacagagcttattctttatattatataagctctctgtatctctgtgtctttgtgattttccttttctttttctttcatttcattttttgtacttcatttctttttcctacatttgtttcacacttaattgtctgtgaacatgcttgattggaacttcattgccagccagattgctacgatagccttcgacattgtttatttcggtgccatcatcggaacgattgtcgtcattatcctcgacaaccgcaatccggtgaaaaccatggcatggatactggtattgatgttccttcctatcgtggggctggtgttttacttcttcttcgggcgtagtcagcgccgtgtgcgcatgatagggaagaagagttacagtcgcttgttgaagaaacctatggcggaatatctggcgcaggattcatgtacgcttcccatcaattacagccgtctcatatctttgttccgtaataccaaccaggctttccccttcgatggaaaccgggtggaagtctataccctggggctctccatgctgcaatccctgctgcgcgaattggggaaagcaacgaagcatatccacatggaattctatatctttgaggacgatgccatcgggcgcttggtgcgtgatgtcctgatggaaaaggcgcgtgccggggtagaggtacgtgtgatttatgatgatgtgggttgctggcatgttcccaaccgtttttttgaagagatgcgcgaggccggtatcgaggtacgcagcttcctgaaggtacgttttccgcttttcaccagcaaggtgaattatcgtaatcatcggaaaatagttgtcattgacgggcacatcggctttgtgggggggatgaatcttgccgaacgctatatgcgcggattctcatggggcatctggcgggatacacatctgctgctggagggcaaggctgttcacggattgcagaccgccttcctgctcgattggtactttgtggaccgtacactgattacgtctacccgctatttcccgaaaatagaaaactacggtacttccttggcacagattgtaacgagtgagcccgtgggcccatggaaagacattatgcagggcctcgtcatatccatttccagcgcaaagaaatacttctatatccagactccctacttcctgccaaccgaagccgtacttgttgccatgcagacagctgccttatcaggtgtggatgtgcgtctgatgctgcccatgcgtgctgataatcgcttgacacatctgggctcctgctcttatctggcagatgtgctctattcgggagtcaaggtctatttctataagaagggcttcctacactccaaactgatggtttcggatgatgagttgtccacggtaggctccacgaatgtggattttcgcagttttgaacataactttgaggtgaatgccttcatctatgacacagaaacagcgcttcagatgcgcgaaatcttcctccaagatcagcgcgactgcgtacaggtattcctgaagaactgggtgaagcgcccttggtatcgtaaggctgcagagagtgtggtgcggctgatggcgccgcttttgtaagtggaaagttgaaaatgagataaaaatcaatacctgatacattctcaccattcatttcccattttcaattttcacctttccgtttaaagaatgagaagttcacgctcccgtacacccttctctccacaaagtgcggatgtccttcgaaactgtttttcttcccgtgttccagaacgaagaggccgtcttctttcagcaggttgttttcgaagataaggtcgggcaaagtttccagcccggcaagttcgtagggaggatcggcaaagataaagtcgaattgctcccgttcgcttttgaggtatttgaatacgtcaccgcgtatgggcaggcacttgtccgtctttaattcctgcataatcttgcagatgaaggcatagtggtcgcggtctttttccacgctgattacttggtcgcagcctctggacacaagctcgatgctgatgctgcccgtaccggcaaataggtcgagggcacggatgccgtcctcaaagtccatgtagttggagagtacattgaacagattctctttggcaaagtctgtggtggggcgtgccttgaaggagtggggcacgtcgaaacgtcgtcttttgtatattccactgattactcgcatagggttatggcttgcaggtcaagattagtggcgggattcatgatgaatacctgccggatgaattttcgcagttcgggcagtagcagctctttgtcgttcaggtcaccggttaggtgcagctcatcgcgctcctgctcgaagccgagttgtttccatatatataataggtagtagacacggtcgggtgtgcttctgcactcaaaggaattggctagaagcaggcgtccgcgctcgtagccgtatacgtctacggcatcttttcgcaagtgtgcatacattttccggctgttgcccaagcggctctttgaagagaagaactcaatgaaggggctggcttgggaatagaacttgacaccgggatactgttcgcgaaggaaggaacaggcactcttatccatgccgaacagtacgacagtgttgttcttatgcagtatgttgtattgtacggtttcattttcccgtttagggtggttgtgatagaagatgatttccgtttgttcgtcttcgaagaactccaggggaatgaacgtgaagcgtttgtctgccatgagcacattgacacggcggaaggggcgtttcagccactccagctcgcggaaagtctgtttcagattggcagtgagggagagggactcatccacttcacggtcgtagtaagaaaactcaccgtcgcccagaggattgaacacagaaaaagaaaatccatccgtgctgagacggatggataatgtatactgttccgatttattaaaatcagtcgtttctatcatacgtttgtcggggtgagattattcccagttaccggcgttgttgttagctgtttccaagctaccaatcatcagaccgcagtacttgccaagtttggtttgtacgtccttgatgttagcaatttcctgcttatccagaccgttcaagtaaacttcatacggagtcttcacttcgagcaaacagaaaggagcaccggatttggctgtatcgttcttgatggccatttcgaattgtgcaccgtttccgaagggaacatatctcattgaatcggggttgaaacctttcgggaagatagtgtccaatacggctacccacaaggtatcacgtttgaagttttccaatccccatttctttacttcatcatatttgccggtcttcttggctttattgatgatgttgatggctttcttttcagtcagaccgtcttccagctgcttatcgttcagttctccttgcttgaagatgaacggaagtttctggtttttaacaaagtcaatcagagagtcgaagcttgcagtatattgctggtcatgtaaagtacgatattccaattgtgctttacggatgtcaatcagacgtgcaatgacagctgcatctctgtgcttctttgctttttcaaagttgataggacccataatgctggcgtaacaaatataaattagcaccaaagcacataagcctaaaatgacattaaatactgttttcatgataaatatgttttttagttgttatattcgcaccgcaaaaataaaagaaattaatttaaaaacgatagttccctttacttttttctgttacaaaaatgataaataactatttagaaaggcaaattaaggaaaattttccttaccaaccaactcctgagcaagaaattgctgtaaaatctttatcggagttccttctatcacctcgtagcgaggtggtttttatgcttcgtggttatgcggggacgggcaaaacatcgttggtcggtgccttggtgcggacgttggataagctgcaacagaagtcggtattgctggcaccgaccgggcgggcggcaaaagttttttcatcgtatgcggggcatccggcgtttacaattcataaaaaaatctatagacagcaatctttctccaacgagctgagcaatttttctgtgaacgataatttgacaactcacactctctatatagtggatgaggcctcgatgatttccaatgggggactgtccggttccatgttcggcacgggcaggttgctggacgacctggtgcagtttgtctattccggccagggatgccgtttgctgctgatgggcgatacggcacagctgccgccagtgggggaggagcagagtcctgccctctttgccgatgccttgaaaggctacgggctggaagtggtggaggtggacttgacgcaggtagtgcgtcaggagcagcagtcgggtatcttgtggaatgccacccgcctgaggcagttgatagcggaagacgattgttacagcctgccaaaaataaaggtttcggggtttgccgatattaaagttctgcccggtaatgagctgatagaaacgctgagctcttgctacgaccatgacgggctggatgaaaccatcgtggtgtgccgttccaacaagcgggcgaacatctacaacaagggcatccgtgcgcagattctctggcgtgaggatgaattgaacaccggtgatttgttgatggtggcgaaaaataactacttctggacggaaaaagagaaggagatggacttcattgccaacggtgagactgccgtagtgcgccgcgtgcgccgtacgcgggagctgtatggtttccgctttgcggacgtgacgctggtctttcctgactataacgactttgaactggaagtgaacatgctgctcgatacgctgcataccgactcgcctgcgctgcctaaggcagagaacgaccggcttttctattccgtcctcgaagactatgccgacatcaccgtgaagcgtgagcggatgaagaagatgaaggcagacccgtattacaatgctttgcaggtgaagtatgcctacgccgtgacttgccacaaggcgcagggcgggcagtggaggaatgtatttctggaccagggctatatgacggacgaatatttgacacccgattactttcgttggctctatacggcttttacccgtgccacgggaacgctctacttggtgaactatccgaaagaacaaatcgtttgaaaaagagaggggtaccgatgcagtattccggtattttttgtatttttgtagatagaacaactataacagaacaagtatgaagaagctatattctctctttgccttgatagcactgctgtttaccgcttccggttgcgaggacgattaccggagcatggtacttttcgaaggcgtggagcctatttatcagattgggacatgtgataatctggtgtctaatctttcttattatctttctgaaacaaacgaagatacagtgctgggcattgacggtggtgacggttcctataatgtgattaacgaacatgagtcggtggcttccgtgacttttaccgatgaggtcaacggttatcagcgtatcaaaattcatccgttggcagagggagagacgattgtgaaggtgatggatggttccggtgaggagacccaactgcgcatcacggtgaaaggtcgcaggcaatatacgttgacgaagatgggctccgagtatggtatcagtaatggtgcactgacggaactgctgagtgatgtctctaaggcgcttgccgagcgtccttgggtgaaggatggcgggtattatgtgctggtacccgaagatttctccaatagtatgtggaaaggtgtattggaaatctatccgacggggaaagaggaggaaccgctaatgggaatatacgagacagttccagtggaagatgagaacggagatacatatgcactgtggcagtttacttataatggagagaagaggctctttacgcggacggtctcgggaaatggtaaatgtgtacttgcggaaaatgtaactcctttctgtccttccggtttgttgcccgaaggtgcactggtggtttatcgcgagatgtttctacttcggacggaatgaggttttagtgaaaatcttgtcaagagtagatttacgaaagattaacagacgggaggcttaggcttcccgtttttgtttctgttgtgcatcatctgtctgttctgtatgcatcattcgtttgcttcgaatgtattgtctgtttgttctggactaatcatccgttccctccacttcactgtcccaaacctcagggcttttcacggaaaccccagggctttggagggtaaatgccagccatttcacttgctaaggtgtggcatttaggatggtaaggtgtggagtttggggagccggcatgtggcatttcaaatggaatactgtggagggtaaaaagaaaaggagaagcaatgctcctcctttcccggtagtttaatttttaaatatctaaaaaatgacgttacaaatatacaacatcgcagaggcgatgtcaagtgtttcgccaattattttcgattataatcctgccaattccaatactttgtcaatggcagcgttcagtccatcaacattcttaccgccggcagttgcaaagtggggctggccaccgccaccgccttggataagtttggcggcttctttcaccaggttaccggctttcagtccacctgtcacaaggttgtcgctcagcatgacggtcagcatcggcttgccttcggcttctgttccggccacgaagaacaagttttccgtaatctggccacgcagctggaaggcgatgttcttcactgtttctgccggcagcggggcacagaacttgatgactttaacgccattgacttcctgcacgttcttcagcagtctttctttcagctgtgcttctttctctttcatgaagtcctctacctgcttcttcagtccggcgttctcgtcgatatacttgcggatggttccggcaaggtcgggtgcgttgttgaagagcgccttcaggtcgtgcagcgtgtcctcgatggtgttcatcaattcctccacgcgtgcacccgtgtaggcttcgatacggcgcacaccggcagccacggagctttcggagataatcttcaccataccgatgtttccggttgcagccacatgtgtaccaccacagaactctacggaagaaccgaactggataacgcgtacatggtcgccgtacttttcgccgaacagagcgatggcgcccagttctttggcttcttcgataggaatgttgcggtattccttcaaaggtatgttggcgcgaatctttgcattaacgatgtgttccaccttgcggatttcctcgtccgtcaccttttggaagtgtgagaagtcgaaacgcagggagtctggtgtaaccaaagagcccttctgctctacatgttcgcccaatacttcgcgcagtgcggcatccagcaagtgggtggcagagtggttggcagcacaagcagcacgtttgtcggtatctacgcatgccatcatcggagcttccaaatgttggggcagcttcttggtgatgtggatgggcaagttgttttccttcttggtgtctactacttcgatggtttcgaactcgtttaccaatacaccggtatcgcctacctgaccgccgctttcggcgtagaatggagtcttgtccagtacaatctgatataaggtctggttcttctgcttcacttggcggtagcgcagaatggatgtctcgtattccgtatagtcatatcccacgaattcagtggtaccttctttcagcgtaatccagtcaccggtctctatggcagcggcattgcgggcacgttgtttttgctgttgcatttcggcgtcaaactccttgatgtcggcagtcatgccgttttcgcggagaatcagctccgtcaagtcaagcgggaaaccgaaggtgtcatataaagtgaaggcgtcctttccgctgattttgttcttgccggcggctttggcgtctgccatggtcttttccagcaggcggatacccgtctccaaagtgcggaggaaggaatcttcttcttccttgataactttggcaatcagttccttctgtgcattcagttcgggataagcggcacccatgttctcgatgagtacggggaggagcttgtacatgaatgcctgcttctgtccgaggaacgtgtagccgtagcgaacggcacggcggagaatacggcggatgacataacctgctttggcattacttggaagctgtccgtcggtaatagagaaggcgatggtacggatgtggtcggcaatcacacgcatggcgatgtccgacttctcatcgtcgccgtacttcttgcctgctatgtctccgatggctttcagtatcggttggaacacgtcggtgtcgtagttggaggtctttccttgcagtgtgcgcaccagtcgctcgaagcccatgccggtgtcgataaccttggcgggaagtccttccaggctgccgtctgccttgcggttgaactgcatgaacacgaggttccagatttcaatcacctgcgggtggtctttgttcaccagctggctgccgggtactttgcccttctcttcttccgaacgggagtccacatggatttccgaacacggaccgcacggtcccgtatcacccatttcccagaagttatcgtgtttgttgccattcagaatgtggtctttcggcaagaactgctcccagtaagaagcggcttcgttgtcgcgttccagtccttcttcggcgctaccttcgaatacggtggcgtagaggtctttggggtcgagtttcaatacatccaccagatactcccatgcccaggagatggcttctttcttgaagtagtcgccgaacgaccagttgcccagcatctcgaacatggtgtggtggtaggtatcgtgacctacttcctccaggtcgttgtgttttccgcttacgcgaaggcatttctgcgagtcagcaactcttttgtatttcgccgggtggttgcccaaaatgatatctttaaactggttcattcccgcattggtgaacatcaacgtggggtcatccttaatcaccatcggggccgaaggcactatctggtgacctttactttcgaagaaactcttgaaagagtctctgatttcgtttgcagtcaacatactctctattgatttatctgattctaatttgatttatcttcttctgtcgttttttgtccgtttcttactactaactacttgctacttagtcttaatattcttgaaaaaactgtgcaaagatagcttgtttttattacttttgtcgcattgacaagcgaaatatttcctaagatgcgcaaagtttactacatttataatccccagacgcagacgtatgaccgtatttatcctaccgtgaggcagcgggcgttgagcattctccgccgtttgttcatcggtatggggctgggtgcgggcagtttcatcgtattgctgcttatcttcggttctccgtcggagaaggagctgcggaaggagaacagcaaactgcaggcgcagtacaacgtgctctcccgtcggctggacgaggcgatgggagtgctgcaggacatacagcagcgtgacgacaatctgtaccgggtgattttcatggccgaccctattccttctgccatccgtcaggctggatatggcggcaccaaccgctatgagcatctgatggatatggcaaactctgacctggttatcaataccacccagaagatggacatgctgacgaagcagctctatattcagtcatgctctttcgatgacgtggtggagatgtgcaagaatcatgatgaaatgctgcgttgcattcctgccatacagcctgtttcgaacaaggacctccgtaagactgcttccggttacggtacgcgtatcgaccccatttatggtaccagcaagttccatgagggtatggacttttcggctcctcagggtacagacgtctatgccacgggagacggtactgtggtgcagatgggctggcaatcgggctatggcaatagaatcgtgatagatcacggattcggttaccagacagtatatgcacacttgcgcgatttccggacgaagttaggcaagaaagtggtacgtggtgaggtcattggcggggtaggcagtacgggcaagagcactggtccgcatttgcactacgaagtacacgtcaagggaaaggttgtgaatcccgtcaactactactttatggacctcagtgctgaggattatgaccgcatgatacagattgctgcgaacaatggtaaggtgcttgattgacggatgattgataaagaaaggattacatcatgttgaatacagataagaatttgaagttatattactccatcagtgaggtggctgccatgttcgacgtcaacgaatcgctgctccgtttctgggaaaaggagtttccgcaactcaatccgaagaaaggagggcggggaatacgccagtaccgtaaggaggacattgagacagtgaaacttatctatcatctggtgaaggagcgcgggatgaccttgcccggcgcccgccaacggataaaagacaataaggaagctacgatacgtaactttgaaatcgtagatcgcctcagagctatccgcgaagaactggtaggcatgaaactggcattggatgagtttacctacgaggatgtggagaacttgaaggaaaatatccaaggactgaagtagaataccactccgtttattcctctactctcgtcacttgttttatattctgtatctgcttcagattattgcagatagtgcgcacgtcgtccacatcgtgtacatagagctgtatctttccttcgaagatgccatcgttggtttcgatggtcagtttacggatattcacgttgagctggcgggagatgacttgggtcacttcgttcagcaatcccatgctgtctataccttttatatatatggtgacgaggaacgacaaatccttgtgagtgtcccattcggtggcgatgatacggtttccgtagctacttttaaggcgggtggcaacggggcattggcgcttgtggatgacaacacggttctgttcgtcgatgtatcccagtacgtcgtcacccggaatggggtggcaacagtcagccatgatatagttctttgagatggtctcttccgtcagcttcagaatctgcttggtgttgattttctcttgcggtgctttctcttccggttgttctttggcatccttgttgtccttgttaccgaaggagaaggtcaggaacttcttccagttgctgttctgtttttccttgaacacattcttgtcggcatcgcccagcacaacccgcttgttaccaatggcaacgaacaactcgtcgcgggtgtggaagccgtgcagcctggtcagtttgtccagagcggcatcatccatacgtatatcctcgtttttgaagaattcgttcagtatggtttcaccttctttttgataggcttttgcttctttacgcaagatggcggcaatcttggtacgggcacgggcagtggtggcatatacttcccactccggctgcacgcgttgcgatttggaggtcaatatctctacctggtcaccgctttgcagtttgtggcttagggggaccaatttgtggtttaccttggcgccgatgcagtggctgccgatgtcggtatgcaaggagaaggcaaagtccagtgccgtagagttctgcggcatggtcttgaggtcgcctttcggggtgaagacgaaaatttccgacgcgaacaagtttagtttgatggtatcgagaaagtcgatggcgtccggttgcgggtcatccagaatttctttgatggtacgcagccatttctccagttcgccttcatcttcgctgcctccgccttctttgtatttccagtgggcggcaaagccttgttcggcaacgtcattcatacgctcactgcggatttgtacttcaatccattgcccgttgttacccataagggtgacgtgcagggcttggtagccgttggctttgggatggctcacccagtcgcgcaggcggtcggggtggggcttgtatatcttggatatggagacgtagatgtcgaagcagtcgtttagctcttcctctatattgcgaggctcgaagatgatgcggacagcaagcaggtcatagatttcctcgaaggggacatgtttggtctgcattttgttccagatggagtagatggactttacacgggcaaggatacggtatttcagtcccattttgtccagttgcgcccgtatcggagcggtgaactcattgaataccttgtcgcgctccacagcggtggcttccagtttctcttctatctcgtggtactcttccggatgttcgtacttgaagctcaggttttccagttctgtcttgattttgtacaagccgaggcggttggcgagaggagcatagatgtagagtgtttcgcctgcaatcttgaactgtttgttgggcagcatggagccgagtgtacgcatgttatgcagacggtcggctatcttgatgaggataacccggatatcgtcggacatagtgagcagcagcttcttgaagttctccgcctgcgccgaggcacggtcgccgaagataccgccggaaatctttgtcagcccgtctacaatctgggcgattttgggaccgaagatgttttcgatatcctctacggtgtagtcagtgtcttccaccacatcgtgcagcaatgccgagcatatggaagtagaccccagtcctatctcattacagacaatctttgccacagcaatggggtgcatgatgtagggctcgccggaacgacgcttgatgcccttatgcgcctggttggcaaagttgaatgctttggttattatttcgatgcgcttgcggtgtttggtggccaaatagtcgttcaacagttcttggaatgcttgttcgatcatttcctcttcggctttttccttttccttctgacttatattttcttccatatactgctttctcctttcttcacttcactttttgcaaaaataagcaattttcaacaccgggcaagcgtttatgtctttatttataaatcttcaaacgctttcctgcggagattctggtactacgcaatccattccaactttttaactgattgactgtgacgccgtattttcgtgcaatgctgccgagattgtcacccttgcgtatcttgtagtaagtgacattccccgtagtggtactgcttttgctgctgcgtgccgtcgggcgtgtattggaaacggccacgactctgcggttcttgaacagctcattgctgcggtgggcatagattgtatcttgtttgtcgatgaaggcactgatataattgatggggaggcgtagcgtctgtggcttgctctctccggggatgatacttttcttgaattgaggattcagactctttatctgatccagactgatgccgcataggtcggaaatctgttcgaaatgaaggttacggcttacctgcaccgtatcggttgcttccggaatgtcggtttccatggggcagatgttgtgcttgcagtagtaggtcattacgtagttggcggcaatgaaggcgggcacgtagccacgtgtctctttgggcagatagttgtagatttcccaataatcggttttccctcccgaacgacggatggctttgttgatggtgcccggaccgcagttataggcggcaatcaccaggttccagtctttgtaaatgtcgtacatgtccttcaggtagcgtgctgccgcccaggttgcctttatcgggtcgcggcgttcgtctacgaggctattgctttccagtccgtatatcttcccggtggcgagcataaactgccatagtccgcaagctccagcgcgggatacggcagaagggttgagagcggattctatgatgggcagatatttcagctcgagcggcagaccgtaggcatccagcgcttcttcgaagatgggcatatagaagttgcaggcgctcagcatgaaggcaacttggttgcgcaggcgtccggtatacatgtcgatgaatttgcgtacaatctcgttgtacggcatttccatgacggtcggcatgcgcgacaaccggtctatgtatacagagtcactgaacatcgggtttacggtagaggtgctgcagtcttttcccaagtctatgtaattcttggctttccagtcattgagcaggctgtccagcggataggtcatgcttttgggcagctcgatggattcctggcgttctgtaccgttttcgcggataagtacttccacgctttcttgcgcatgcatggccggaacggcgaagagggcgcaaaacagaagcgaggaaccgagaataattcttttcatatatatggccttgtgtatcattaggtaataatttatgctttaattttcgtttttagaatcggaaactgcattgcacgccgacgttcttattagaggaaccggtcatctgactgttgattatggcaggttccactttcatgctgaggtcgggggtgatgtcgaagttggacagttctgcgtctacgtatgcgtcgacaacggacaatagatatacaccgataaaggcgaagatgctcaagtcgcggtatcgtcggaaggtgtccttacgcttccgcagtgtctccgtcagctggctttcggtatagttatagttgggaggcagcaggtcggtaatggtactggagttgaaattaccatttacggcatccttgtaggcggccgaatagtccttgtacatcttgctgttccacgtgagggcataggcacaaccggcaaatcctccatagaagatgggcagtttccaatatttgcggttgtagatttgtccaccgccgggaatgacgagggcaagccaggtggcttttgtggggttgggcacccatcgcttggggtcgatggccttttgcaggctgtctgtaggtacgggctgttccttcaggtcggggctggcggtcatttccagcatcttccgtttgttttcggccgcaagactgtcggcaacagcgaggctgtcccggtttaccacggtgttgagtgtatcggtctgatgccgctgcgcacgcttggaagcggcacgcggacggtcctgaccatacatagcaatccctgccgtctgtaaaaaacagagcagcagggtaatggctaactgatatattcttcctttttttctcatttatttcttcagcgtatcaagaatgccgatgatacgttccaattcttcttcgttattgaacgggatactgattttgccttttcctttctccgagcaggtgagttgcaccttggtgctgaaaaagcccgagagttgttgtttcaacatattgaattcttcgggcagtttggcgcgcttgggagcaatcttacgaccaccgcttttcacggtttcgccttcactcagtgactttactatttcttccactttgcgtacggaatacccgtgctccaggatttcctcgaaaatctttacttgcagtttggggtcgccgagcgttaccaacgcgcgggcatgtcccatgtctatctgcttgttctgcagccccatctggacgggagctggcagtttgagcagccgcaggtaattggcgatggtggtgcgcttcttgcctacacgttcgctgaggcgctcttgcgtcagcccgtattgctccaatagatgctggtaagcgagagctatttctacggagttcaagtcttcgcgctgtatgttttcgatgagcgccatttccatgacgttctcatcgtctgcagtgcggatataggcggggatgctggtcagtccggcaagctgcgaagcgcggaaacgacgctcgccggcgataatctggtattcgtcgtcgctaagcttgcgcagggtgatgggctgtatgatgccgatttcggagatggaatcagctaactcctgcaacgcaaccgggtcgaattcatgacggggctggttgggattgaccgtaatcttcgacaactctatttcattgatagaagaggagccttcggtctttacttcatccatggagaagagggcgtccagcccgcgtcctaatgcatttctttgtgccatctatttatttactatttattccctacggtcatgacacatttcttatctttgacacataggtacgttgacgatttacaatttactatttagccatacggggtgattttgttgtgtattgtaaatatggtatttatcactaccccctaatcattaatcactaactgcttattccttatccctaaccgctaatcccttctttcgtttctgcttatcagctccttggcaagtgccatgtggttcttggctccggttgagtctgcgtcatagagaatggtgggcaggccgtagctgggagcttcgctcagtttcacattacgctggatgacggtgttgaacaccaattcctggaagtggcgtttcacttcatcgtaaatctggttggcttggcgcagacgcgagtcgtacatcgtcagcaggaagccttcaatttcgagggcagggttcagcttggacttgatgattttaatggtattcagcaatttgctgatgccttctagtgcaaaatattccgcttgtacggggatgattactgaatcggcggcagtcagtgcgttgaccgtaatcaggcccaaagacggggaacagtctatcaagatatagtcaaattcattcttcagcggagcgagtacctctttcagtatcttttcgcggtttttcagattgagcatctctatttcggcacctaccagattgatgtgggaggagattaccttcagtgtgtctatctccgtgtcatgaagggcttcgcgtacgtctgcacggtcaataatgcactcgtagatagtacattccgactgcttgatgtccacacccaatcctgaggaggcattggcctgagggtcggcatccacaacgagcactttcttttcaagtgtggcgagtgaggctgcgaggttgatcgtcgtcgtagtcttgcctacaccacccttttggttagccatagcaattatttttcccataatctcaatatttattggcagcgaaataagtgataattccggatagcgcctacaaatttggagaaagattgcaaaaacggttgataagtcggctgttttgttaataactcacagacgtttaccgctgtttttcttcctgtaaattactcgtaaagcgttctttctctgtttagtgggcaaatatacgtatttatcttgaaatgaagctgtttttttgtctcgcttgcagaagattaagatttgtaaaccaatggaagacattggcttggactattctctctacttgcatgagatgtacatctcgtgttgtttgagacgggcatctcatgttgctcgagatgcacatctcatgcagatggactactgtgtggatggcggtcggcagataagttgttcccaggcggaaggagaggagatggtgtcagaccaaggctttgacgaactcccagcagaagtatgcacatatgacacatttcactactgtgcccagcaagaatccaagcagcgagcccagccccgatttcaaggcctggtctgtcttgctgcctcccatcagttcgccggcaaaggctccgagaaaggggccgaggatgatgccccaaggcatgaagaacaaccctacgatggtgcctatgaggcagccgcgcgttccccaccgactgcctccgctatatttgctgcccagcatcgggacgaaataatccagtatctgtacaaggacgactgctgccagccatagaagtaactgcgtggtggaaaactgcgccttgtccgtgaaatgtagaagcaacaagcctgcataggctacgggcggtcccggaatcataggcaggatgcagcctgccaatccgacaatcagacagaggatgcccaagatgatgagaagaatgtccataggtgtatcgtttctgttggtgaagatgacagcggttgttccctgctactcgaatcggttgtatatgacaatggggcgggagcggcgtgtgctcatcgacgggaaccatatatcgtcggctgtgaggccgcattgcttgatggcttcggcgcagtattccagtcgtccgaagtcggcatcgacattgtttgtaccgaatgtgaatttgattccacgtgctttggcgcgacggataatctcgaaactgggaatccggtagcgtgcattgatttccagagcgattccatgttgttgcaatacatccaatacgcgttcaatgcgtccgtccgtccagtacttgtcgtaatcattcgccatagtgtcgggcaagaaggtagggttggcataaatgtcggcaggctcgttggtcagaatcaggactgtttggtcgacaaggtggtccatataccgttcaagcgtaatgtcatcaaagagtgcttcttcggcccggtagatgcgcgaattacgtcccttgtggtctatgatggtcatggcgtcggtaaacaggtaatcgaaaatccccaaggcttcctgcgagaaagttgccgtccatttgcgtccctcaccttgtacaccgcacaggaatggcatcccttttacttcattaaaatagtcgtacacttctttgttatcggccagcatacgtcctacgcctccttctccggcattgggggcgacaccatagttgataccgtaattcatggacatggcgtgtgccgtttccttcgtcagccctcctttcaagtgaacgtggtagtctataactgggaaatcgcgctgctgtagcctgattatctcatccgtgcgctcgtctaccggagcaagcgtgtcggcttcgttgcgtgcttccttggcaagctgttcgatggcgagattccggaatgacacttcgccgtgtatgccttgcaaggctatggaaccttgactcaacagttgccgggcgtgctcctctgtgcgatatggatgttcgggttcggtatagcagacaacttcggttccgttaatgcagacaatgatgttttgtccgcgtacggttatctcgaagtcaaaccattctccatcttttgcgagtgagcgatagaggttgcgcaccgaggcgagtgagccgctcttgcgtgtgccgtcgatgtctccgttacggaatatcacttcataaccggactcgccgtccgtatgaaagaggaggcctgcttcggagccgggttgtgtgagggcttctccggtgagtcggaaattttggtattctttgtcgttgaagagcttccggccttctgcaatgaccgggtctgccgtgtgaagcgtagatgtcccgtcattccattggtcaagtggctcgagagaactgttcctgccacaacttgtcagggttgttagaaacagaattattgcggcagctgccgtctcgatgcgtgcagcaatggtaggatggcaaaaagtgttcattatagcatggattttatgaatgattatattccgattattgtcggtacaaagttagccttttctgaaaatatctttgaatacaaaagaattattatctttgtagtattcagtttaaagcctttttagctacttttgcacgataataaaaaagaaagttatggaaaatcagagacctttgatattgatttccaatgatgacggcatcattgcgaaaggtattagcgagttaatcaaattcctccgtccgctgggtgagattgtggtaatggcgccggatgcaccccgctctggaagtgcttgtgcgctgacagtaacggaacctatccactaccagctggttcgtaaggatgttgggctgacggtatacaagtgttccggtacgccgaccgattgtgtgaagctggcttttcatacggtgctcgaccgcaagcccgacttggtggtaggcggcatcaatcatggcgacaattcttccgtaaacctgcattattccggtacgatgggcgttgtgatagagggatgcctgaaaggagtgccttccatcggattctccctttgcaaccatgagccgaacgctgattttgaacctgcaggtccttacatccgcgagatagcccggctggtattggagaaaggactccctccgttgacatgcctcaatgtcaacttccccgataccaaagaattgaagggtgtgaagatttgcgaacaaaccaaggggcaatggaccaatgaatgggaaaactttgcccatagaggagatgcccattactactggctgaccggcgagtttgagaacaacgatgccgaaaatgagaagaatgaccattgggcgcttgataacggttatgtggcaatcaccccgaccacggtggatgcaacggcatacggcttgattgatgaactgaaaacatggttctgaattaattgacaattatcaattgatatgaagtactacttgattgccggtgaagcttctggtgacctgcatgcttcccatctgatggctgcattgaaggaggaggactcgcaagcggagttccgtttcttcggaggcgatctcatggctgcagtgggtggtgtgatggtgaagcattacaaagagttggcatatatggggttcattcccgtattgctgcatctgcgcaccatttttgccaatatgaagcgctgcaaggaggatattgttgcgtggcagccggatgtgctgattttggtggactatccgggctttaatctggatatagccaagtttgtccatgccaacacgaggattcctgtcttttattatatctctcccaagatttgggcatggaaggaataccgcatcaagaatattaaacgggatgtagatgagctgttctccatcctaccgttcgaggtggagttttttgaagggaagcacgggtatccgatacgttatgtcggcaatccgacagtggatgaagtgacggcttttcttgcttccagctcagagacattcgacgactttgtccgggcaaacggacttcctaccaaacccattattgctctgctggctggtagccgcaaacaggaaatcaaggacaatctgcccgacatgcttcgtgcggcagcttcttttcccgattatcaactggtgctggccggtgctccgggtatttcccccgagtattataaacgttatgtgggtggggcggacgtgaagattatcttcaacaagacataccctttgttgaggcaggcagaggctgcactggtcacttcggggacggcaacgctggaaacagctctgttccgtgtgccgcaagcggtgtgctaccatactccgataggaaaggttatcgctttcctgaaacggcatatactgaaagtgaagtacatttccctggtcaatctcatagccaaccgggaggtggtgaaagagctggttgcagataccatgacggtagagcaggtacgctcggagctgaaccgcattttgtacgataaggaataccgccgtcagatgctcgagggatatgagtatatggcatcccgtctgggagaggcaggagcacccaaacatactgcccgcgagatggtggcattactgagaaggagggaagaataatcgaaaaattaagaatttgttaaaatgggaaaagccggtgcagtaaatgcccggcttttgtattttctatacagaaacaaatgaaaaggactttgattatgaaaaagctacattggttatttatggcaatatgtttggcagtgatgcccgctttgcaatcatgtgatgataacgacggatattctttgggtgatttcaccccgcctttgtgggctactgtgcgtgttacgggaaatgccttttatttaaactgcgatgtctgggggacactctggccggtgaatacggacattgggtggtatgatgctgtggatgggcagcgtgtgattaccatgttcaatcctttgtgggacgactatgcagggtatgaccatgctgtgaaattgttacgcttgcagaatgttctgacgaaagaggtggagacgctgactcccgaaacagaagaggagttcggcaatgattccgtacttatatataaaggtgacattaccattagcggtggctatatgaacatttttttcatgcagaacctgccgtcttcggctgataataaacatcgcatcagtctggtacgtccgcaagaagatgatgctttgtatggtgaagacggatacatccacttggaactccgctataacgactatgatgacttgacgggttatcgcagccccggtgctgtttcttataatctgaacagtctggacattccctttgaaaccaaaggtatcaagttgaaactcaattcagaggagaatggagaggtggaagtaacctttgatttgaaaactgtgggtactaatgaaaagttgactactaatgtggatttgtccaatatgcagttgaagtaagaaagagtttgcgagagtatatagttagaaagagcacccgggattttgatgtcattcaccttgcccgggtgctctttttatatttgttttatgtaagtttggtcatgtgagtcgtcgttagaacatcgtcaaggcatatagataaacaactgctgcaggaattgccatcagtgcactgtcgaaacggtcgagcatccctccatgccccggcagaatgttaccggaatcctttatgcccaattggcgtttcatgagtgattcggtcagatcgccccaagtgccgaaaatgacgacaacgattgccagacctacccattgccattctgacataaatggaaagaagtgtgcaaagccaagagaggaagcgatggagaatattccgccgccgatgctgccctcccaagattttttaggtgagatacgttcgaacagacggtttttgcctatcagcgaacctacgcaataggcacctgtatcgctcaaccagataaatacgaaaatggaaagcggtagaatagggttataggttacactgcccgtttccgaggaattttgaaaagcaagtacgttcagcagggcaaaggggagtgccacgtataattggcttagcatggagtaggcccagttacccgtcggattctttttcttgaggtaaagttccgtaatcatcatgtagagcaatagtcccaaataaggaaggaatacccgtgctcctacagactgctgggtacagaaactcattaatgcaaggaaaaggtaggctccccccaatgcagtgatggttttgttaatgcttacttcgccgcttttgctgactaattgggcaaactcatgtacgctcagtgcgctgataatggtgaacagtataccgaacgaaagggggctgtaaagaatacagcccaccaatactatgacgaataacacgccggtaacggcacgttggataaagttatttttcatgcttttcttcttcttccttgacttccttttctgcttctatggctttttgctcttcttcttgctctgctttttttagctcggtagcagtcttgtttgcactgatttcctccgagcgggaagcccatggacgtttcccaaagatgtgttcaacgtcttcggcaaagattacttctttgtcaatcagcagttgtgccagccggttgtgcccttcttggttttcggacaatattttcttggcacgttcgtactgttcgttgaccatctgcttcacttcttcgtcaatcagttccgcagtcttttcgctatacgggcggttaaaggaatattcctcattattatagtaacagaggttggggagtttttcgctcatacccagataggcaatcataccgtacgcctgcttggtcacgcgttccaagtcattcatggctccggtggatattctacctaagaataggtcttcggcagcacgtcctcccaaggtggcacacatctcatcaagcatctgttccttggtggtgatttgccgttcttccggcagataccaagccgcgcccaaagcgcgtccacggggtacaatggttactttaatcagtggattggcgtattccagtaaccaggagatactggcatggccggcttcgtgtatggcaatggaacggcgttcggcctcggtagtgattttggttttcttttccaacccacccacaatacggtctacagcgtccaggaagtcttgctttccgacaaactttttgccgtggcgggcggctatcaaagctgcttcgttacatacattggcaatgtctgcccccgagaatccgggagtctggcgtgccagaaggtctacatccacactattgtctatcttgatggggcgcaggtgtacaccgaatacttccttacgctcattaaggtcgggtaggtctacatgtatttggcggtcaaaacgtccggcacgcaacaatgccttatccaaaacgtccacacggttggtggcggctaagatgataacaccactgttggagccgaaaccgtccatctcggtcagtaactggttcaatgtgttctcgcgctcgtcgttgccacccatagcggctgctttggcacgggcacgccctacagcgtcaatctcgtcgataaacacgatacaaggcgctttttcctttgcttggcggaacaaatcgcggacacgggaagctcccacgccgacaaacatttccacaaagtcggaacctgccaaagagaagaaaggtacgttggcttctccggccacagcctttgcaagcagggtctttccggttcccggagggcctactagcaaagcgcctttgggtatcttacctcccaaatcggtatatttctggggctctttcaagaactcgacaatttcttctacctcttgcttggcttcggcaagtcctgccacatctttgaatgtaatcttgatgggggaacctttttcaaacaattgggccttggactttcctacgctgaagatgcctccacctccacccatgcctccaccaccgctcatgcggcgggacatgaaaatccagaaaccgataaggaatgcaaaagggagaatctgccacagaatggcaccgaagtagttccgttttttttcgtagttaatagaaccgtcaaagtgggcgtcgtctctttccttttgcaggaaattgcccaggctctcgcgtgaaggggcctcggtcgtaataagcggattcttacctacgcgactggagtcctgacgaaatacgtttcctacgtgttgcggtttgacgtatgcttcgacagaattgtcgtcgtagccgatgactttgcttatataaccgtctcgtacatattgctggaattcatcataagaaatatttttagttgccgtaccactttcattagtcaggtacaaccccagcaacatcattgctataatcatatacagccagttcaggttgaacttgggcatattcactttattgggtttcttgttggtattattgtccatacgttttgattaatcgagatcaggaatttgagttaatttggcgtctgcccagaggtgttccagattgtagaattcccttgtttcaggcaggaagacatgcaccaatatgtccgggtagtccatagctacccattcggcattgcgcagcccgtctacggcaaagggcttggtgtcggcacccttgcgtgtgaagtccctgatggattctacaatggctgtcacttggctgggagagtttccttggcagatgacgaaataattgcatattgtatcgtcgatttttgtcagatctgcgatgacgattttttttccttttttatcttgaataccttctgttatctgttgaatcagttttttcgtttcgttcattatacagtattatattaaaactgttgacaaatatacgttgatttctcatatcaaacacgcaaaagaggaaaactctttcaatttttgattttttttagttatataatcctttggattacggtatcttatcagttttttgcgaaaaaaatactcgtttttgttttgatttatagaaatctttgtatctttgcaaccgcaaaacggaaataacaataattgggctatggtgtaatggtaacactacagattctggtcctgtcattcctggttcgaatccaggtagcccaactatcaaacagcttatttaagtcaaaaaaccactaaaatcgcaagttttagtggttttttcgttacttttcaatcatgtacgaaaatttcagtgtaggcattcggtggcaaattcagtgacaaggcttctgtaagccggaaatattctgtaaatttgtagcatttcaacattaaagcagaattttatggcaaaagaattagcactgaagtacggctgtaaccctaaccagaagccggctcgcattttcatgcaggagggggagttacctattgaggttctgaacggacgtccagggtatattaattttatggatgccttgaatggatggcagttggtaaaggaactgaaagaggcgaccggtatgcctgctgcaacttcattcaagcacgtcagtccggcgggggccgccatcggtttggaactcgacgaaataatgaagaagatttattttgtggataatcttccgctctctccgcttgcttgcgcatatgtgcgtgcccgcggtgccgaccgtatgtcttcttatggtgactttatcgctttgagtgatgtgtgcgacgaggctactgcacgttttattaaccgcgaggtctcggatggcgttattgctccggggtatacggacgaagcactggctatcttgagggaaaagcgtaaaggaacttacaatgtgattcagataagtcccggctataagcctgccccgattgaacataaggatgtctttggtatcacgtttgagcagggacgtaatgagataaagctgaatggagatgaactctttgcgaatattcctactcggaataagaatttcccggaagcagcgaaacgtgatttgatgatagcccttatcactttgaaatatacgcagtcgaattctgtatgctatgtgaaggacggtcaggctatcggtattggtgccggccagcagagccgtatccactgtactcgcttggcgggcaacaaggccgacatttggtatttacgccagcatccgagggtgttgaatttgccatgggtagagaaaatccgccgtgctgaccgtgataatacgattgatgtctatatcagtgaagaccatgacgatgtgctggttaacggtgtttggcagcagttctttacggagaaacctgaagtgctgacccgtgaagaaaaacgggcttggttggatacattgaaaggtgtttctttgggttcggatgcattctttccttttggagacaatattgagcgtgcccataagagtggagtagattacattgcccaagcgggtggttctgtacgcgatgaccatgtgattgaaacttgcgataaatatggcattgccatgacgttcacgggtatccgtctgttccatcattgataagacttaataaaaaagtagacccgcccccacggctgtatagctgtaggggcgggtctacttttttattaagtcttatcttgttgcgttatccttgatttttgatattctcgtccaccacttttatcttttcttttacaagttcgatatctgctttcagcttttccaccttgcggttgatttctgtcagcagactatttcccttcttggaagaagtggtcaggaagccgagattgttttcatatgtctggagctcgttcttcatattgtcgaaggcacgtaccagcttctcacgttcccggtaaagggcttgtggactaccttcctgaatggagctgatagtcgacttgaagttgcttagcttcttgttggaggcgctgatgttgaagcgttcaaacaatttgtctacctggctgtggtattgcttatagattcggtctttctctttgaaaggtacatgtcctacgccgttccactctttcatgaggtcgcgtaccagttgggtagcttcctccgtattcatttggtcatcgatagcattcagtttctcgatgatggcttttttcttttccagattttcctgctctacgctgcgctgtgaagaagtggctttgttcttttgttcgaagaagtagtcacaagtggagatgaaacgtttccatacggcatccgaatatttttttgctaccggaccaatggttttccattctttctgaagtttggtcagttcatcggcggttgctttccagtcggtactgtccttcagagcttctgctttttcgcacaaggcacgcttcttttccaggttttcgttcataccttccttcaggctcttgaagaactctccctttttacggaagaactcgtcgcacgctttgcggaaacgttcgaaaatcttcacgttcattttttgcggagcgaaaccaatggttttccatttgttttgaagtgcgatgacttcttgcgtcttgctctcccaagaagcaaagcttgtcagttctttgtagtcaatggcttctatgatttcgcaaattacagtcttttggtcaagattgtgctgttccacttccttcaatgcttcgaaatgttgctggtgacgtcggtttacggttgtagaggcagctttgaaacgtgcccagatttcgtcgcgtagttccttggctaccggccctgtatcacgaaattcttgatgtagcttctgtaactgatggaaagctgaaactacatcctcttcatccgccagcttttcggcagcttcacagagatgtgtcttgatttccaaattcttcttgaaatcgtattcgcggaattcattgttcagtttcagaaggtcatagaatttctcaacatacaattggtagtttttccaaagctcgttgaccttagcttgcggaacgagtttaacttcgttccattgctgctgtagtttcttgaactccgtatagctcttgttggcgtcatctggagattcaaccagctccttcagctcttcgatgatggaaagctttacctgcaggttcatttccttttgcttctccagttcggctgtgagtgcacttcttttttctttgatgacggacatgatattcttgaactcttcctccacacagtctgtttgtggaacaaagttctccgcggcgcctccgttttcaatgaacagttttctcgccgcatcctgctcagcattgtgcagcttgtagaaagattgcttcaaaccgtctatttcaggttttgccacgttctccacgtctgcaaccacctctttgagtttggcaagtatttcctctttcgtgagcttcagaactgactctaccggctttttagaaacgatttcttcagcgggagtttctgttgttgccggttcagaaacctctgctgtcttcttttcttcttctaattccaccggcttttcggggagattagtgtcatgagtgtccgtcattgtatttacttttttagaaacgggttcctcccgttcgggttacattaggctacaaattaatgaaataaaatgattacttcatacaatttgccttgatttttttctattttcttgtttttatgacagtaagactgtgatacccatgtacagcatcatgcctataatgtcattggtgatggagataaatgggccggtggcaatggccgggtcaaccttcagcttctctaaagtcatggggactagcgttccgaagatggaggcaaacatgacgactgcaaagaggctgatggagacggaataagtgaccgtagccgtagctccgaaccggataaaattataaatgtatactagcagggaaatgatggttgcattgataaccgccactacagcttccttagctacctgtttgaaggtgtctttggcatccagtgagctgttggcaaggccttgtacgatgatggcagacgactgggttcccacgtttccccccgtaccgccaatcaacggaatataaagggccatttccgggtgggcggcgaaagtcgtgtcgaagttgcccaatatcatggagttgcctataccgcccagcataccgatgagtagccatggaaggcgggctgaagtttggcgcataacattatcgtccgtttctacatcttgggacaaaccggatgccagctggtaatcacgttccgactgttcgcggacttcgtccatgacgtcgtctacggtaatctggcctaccaggcgcccgatgctgtctacaacaggaactgccactaagtcatacttttcgatgatttgcaccacttcgtcaatgggggtatctacatggacggagataggatcttttcgcatcacatgctttaccttggagacagaaggggaagttatcattttctttaatgggaatactccttgcagacggtcttcgtcgtcgatgacgtatacgtagtaaatttcatccagcttttcagcttgcaggcgcatttccttcagacactccggcatactccagttttcattgacagtcaccatttccgtacccatcaaaccaccggcagtgtcttcatcatatttcagcaggtcaacgatgtcaccggcttgttctatatcttcgatgtgcgaaagtatttcctcctgcttgtcttcatcgagttcgcgcatcaggtctacggcatcgtccgtgtccatataatccacgaaacgtttggcaatggtctccgaaggaagaagttccaggaattctttccggatgtcttcgtccatttcaaccagtacatccgctgccgtttcgttgtcaaggaggcggtaaacgaagcgggcttcctccaagccgaggtcattgcatagttctgcaatatccgccggatgaaggtcggtcaaaagtgtcttgacgttttccgcgtctttctgttctatcaggcttttgactttgtctatatattcttcgtctatttccatgattattcgtgtttaatcactaaccattaatcattaattgttctcaatgcctgctccacttggttggtcagctgaataaattcctttacggacagttgttccgggcgtttattaaataatacgtcctccgtcagtggacagtctttgccgagtatcggttttatggagttccgcagtgtcttgcgtcgttggttgaacgtggttttcactacttgcttgaacaatttctcgtcgcagcctaaatcgtgcgtttcattgcgcatcatgcggatgacggcacttttaacttttgggggcgggttgaagacatgttcgtgtaccgtaaacaagtactccactttgtaccatgcttgtatcagtacacttaggattccgtatgtcttgctgcccggcccggcggctatgcgctcggctacttccttttgtatcatacccgtacagcagggaatcagatccttatattccagcattttgaagaatatctggctggagatattataaggatagtttcccgtcagcacaaaaggttgcccgccaaacaaccgttgcaggttcattttgaggaaatcgtcctcaatgatgttgtcttccagttgcggataggcttcccgtaggtaggccactgactcgtagtccagttctactactttgacgttgcgttctttgggcagaagaaactgggtcagtactcccattcccggaccaacttcgaggatgggaatttcgggacagacatctaccgtgtcggcaatgtcttgtgccactttcaggtctttcaggaagtgttgcccgagaaactttttaggtttaactactctcatgtatcaactaaatcattacttttgctccgtaaacgtaggctgtagcgtgaacaacaacctatctttacacggagcaaaggtagttcttttcaatgaagaatgaagaatgaagaatgaagaatttgggaatatcgtatgaataagctgctaaaaaaaacgttgaaaatcatcttacccattttattgggtggttttatcctctattgggtatatcgtgattttgacttttcaaaggcagaagaagttctacttcatcagacgaactggtggtggatgttgttgtccttgttcttcggtgtgatgagccatgtgttgcgaggctggcgttggaagcagactttggagccactggatgctcatcccaaaacaagcgattgcgtcgatgccattttcgtatcttatgccaccaatctggtactgccccgtgtgggagaggtttcacgttgtggagtacttgccaaatatgataatgtttcctttgcgaagtccttggggacggtggtgacagagcggttggtagatacgctttgcattctgctgattacggggattacttttttggtgcagatgcccgtttttttccgtttttttgaggagacgggcaccaagattccatcactgatgcatcttgtgacttctccttggttttatgtggctcttttttctattattggtgttctggtacttctctattttctgttgcgtatgctctctttttttgaaaaggtgaagggggtagtcttgaatatatgggaaggtgtgatgtcgcttaagaatgtgaagaatgtgcctttgtttgttctttacactttacttatttggctatgctatttttatcatttctatataactttctattgcttccagtttacagagcaccttagtttccttgccggaatggtgatgtttgtcggaggaacgtttgcagtcattgttcctacgcccaacggggcaggtccctggcactttgctgtcatcattatgatgatgctttatggggtaaatgctacggatgcgggtgtctttgcgctgatagtgcatggcatacagacgttgctggtgatagtgctgggcatctacgggtcgttgcacctggtgttggcgaataggacaaagaaatagacgtttcttgtggtgagttcctatattgttatttcttatgttagaggacagaaacagttatttatagagaaccactgtagtactcctttaaaagtactgtaatacttctttgcaataacttcggcatttccttatatgtactggagtcgtaaaggttgttggaagattggtttctttaaacgatattgttgcttgtatatggaagcgggagaaattcctaaatgatgtaaaagccatatttaagatagccgatgatttagtactttagaaaaatcccggtttattgtactttccgagaataaaccgttatatttgcgaaaactaactttttagaattatgagtacaatcttacagttagctccacagaatgtatggaagcacttttattcactgacccagattccccgtccgtcaggacatatggagaagattaccaaattccttattgattttggaaaaggcttggggttggaatcatttgtcgacgaggtcggcaatgttattattcgtaagcctgccactccgggtatggaaaaccgcaagggcgtcatccttcaggcgcatatggacatggtgccccagaagaacaacgatactatccacgattttacaacagatcccattgaaacctatgttgacggtgattgggtgaaagccaaaggaaccacgctgggagcagataatggtttgggagtggctgccattatggcggtacttgaagataataacttgaagcatggtccattggaagccctgattaccaaggatgaagaaacgggaatgtatggtgcattcggcttgaaacccggaactatgcaaggggaaattctgctgaaccttgactctgaggacgaaggcgaactctatatcggctgtgccggtggtcttgatattactgctactttggaatataaggaggagacgcctatggccgatttcgttgctcgtaaaattacgttgaaaggtttgcgtggtggtcactccggtttggaaatcaatgaagggcgcggtaatgccaataaattactggcacgcgtcgtacatgatttgctgattgagtttgactcccagctggcaagttttgaaggtggcaatatgcgtaatgctatcccccgcgaagcacatgcggtattggtgttcaatcctgaggatatggacggtttggaagattatatgaaggaatacgaggcacaactgaatgacgaatatgctccgattgaaagtggtattactctgagtgtagaagaggtgactctacctgctgccgttgttccctcagaaatccaggataatatgattaacgtgttgatggcttgccagaatggtgtgatgcgtatgattcctactgttcccgatactgtagaaacctcctctaatttggctatcgtaaccattgcagatggtaaggccgaagttcgtattttggcgcgtagttcttgcgatacaatgaaggatttcctggcagacagcctgacagcttgtttcgctatggcaggtatgaaggtggaattgagtggtggttattccggatggcagcccaatgtggattctcctatactgcatgccatgaagctgtcctataagcagcagtttggtgtggaacctgccgtgaaggttattcatgcaggtctggaatgcggtattattggtgccaattgtccaggactcgatatgatttctttcggtcccactttgcgttctccgcattcaccggacgagcgtgcattaattcctactgtttccaagttctatgatttcttggtggctacattggagcagactcctgaaaagtagagaatactttatgttatgaataggggcggggtgctttataagtatcctgccttttttatctgtgacagtttgtcctctttctgccagaatgtctcggacttattacaatgcatgtcaatatcctttcactttctccttgaaaattgacttaagtcaagaaatgtgttataaaacatgttttctatccattttttgcttgttatcttgaacaaaggctctatttttgtgttgtaaaacatgaaaacaatagaaaactagtagattttttaaggataacaagattgattttaggaggataacaaaatgaaagtgttaaagagtttttttaagcatgtcggcgaagccgataagaacatttggggatatgtaatgctttaagcattccttccctttcgtgaagtatcgaattttagttttcaggtattggtttaattttttaagattatgaaaaagaagattgcaaattcatttaagcacattcttaccgccgctggtaagaattggatggaggcaatgagatattatagcctccaaatgtgagtacactaacatttaagtatagaacaagggatatgtttgcaaacatatcccttgtttttttgtaggagtagaataagattttttatatctaaaagtacatttgtttgaactttattcacttcctttgttattaatacaaagactaacaaacgaataatcatgagagtaattcaaagaatttgtagcatattgttgctgctggttacatttggggggtcggcattgtatgcgcagacgtacgataagttgtggaagcaggtggagcaggctcaaaagaaaagcctgcctcaaacagtgataaaactggctgatgaaatctatcggaaaggtcggcaagagcagaatgctccgcaaatgttgaaagcctacatttgtagggagacttatcaagaggggctgactccggacagcctttactccagtctgaaatatatggaatcttgggcacaatcggagaggaatcctgtgaacaaggctattctacactctttgttggcatatgaatatgttgacttgatgcggaagaatcgccgtgtcttgctgtcacgtactctactggctgttgacgaggtcccggaagatatccgtgagtggagtatcagccagtttgtggataaaatagataggtgtaaccgtgcatccttgcaggattccatccgcttgcttgatacatctgcagaaaaatatgtgccttttgtggtgttggaagacggtagccggttctatgggcacgatatgtaccatctcttggtaagccgtgctgttgatgcctatcggcaactggatggtttcagtgtggattctttggtacaggcccgtatcgaaaggatttatctggatatgatgaatgcttatcgccatcgtgccggttcggaagatgctatgttgctctgttctcttgattattggagctggaagctgaccggtggtatcagccagcagccttatcctactttccgaatgcgtcaggaaaaggctaatcgggaatatcttgaggttttggataaattgataaaggaatacggttcacgagaggtttgtgccgaggtttacattcataaagccaaccacctgcgccgtttggaaccgaaacgcgctgatgaggctctaaaagtctgtgaagaaggcttgaagcgctatcctgcgtataagcgtatcaatgagttgaaaaatatccgtgaacagattttgcagcctgaactcattctgactatgaatgaaagcggttatcccggcgattcggtaaatatgagactgcattatcgtaatgtcgggggcttcactctcaacttatatgccactactttaagtgaagtgccttggatggaccatggtataaataaagatacttatagaaaatatgcccggaagttttcttccacgcattttggcttaaagccgttgccaggcaaggataaattgcctgaagatgtcccttatcttgcctcggacactgtatttaagttcatgatacctcgggaaacgggagtctatattcttcaaatagtacctgatgctgaaacggcccgtacagatgataaatttttggtatctactcgcttcaaggtgctgacattggatttgggtgacgaccgtatggaagtggttacattggatgcccgtagcggacagccgattgctgatgccaaagtgagtttctactcttcttatgatgagaagaatagaaaagtgatggcagaggtactgactgatgccggggggaaagctgtattaccctggcagagtggaatccgaagttatgtggcgcgtaaaggcagagacacaggtatgatgccgcagaatgtttatatgaatcattcttattacggtataaaggatacagattggaggcagatggcattgctgacagaccgttcgctttatcgccccgggcagaccgtccatgtaaaaggaatagcttacaaacagaacagtgataatgcccaggtgctacaaggagttgattatgagcttgtcttgttggatgccaaccgaaaggaacttgccactaggaaggtgcagaccaatgatttcggctcttttgctacggagtttgtacttccggcagcttgcctgaatggcatgttcagtatacggactaaagagcctcaatctaccgtcacttttagggtagaggagtacaagcgacctacgtttgagattgccttcactccggtttcggaagcttaccgactggggggcaaggtagtgttgaaaggaaatgtcaaggctttcaatggcatgatggtacaggatgtgccattggcatatacggtgactcgccggaatccgagacctggctattggagcaatgctgataaaccattactgtctgacaccatacaattggatgccaacggggatttttccatacccttgactttagaggttccggttgtagatacagacgggtatggaagtgtgtatacttatcatgtggaggcggtggtgacggatgaggctggtgaaacgcagtccgcttcgtataacttgctggcaggccctaaggcttattcctttgatgtccgcctgcctcaatatgtttgtaaggaagatagcatgctgttcacttttagagtgaataatatgatgaatgttcctcaagatatgaaaggctcctattatctgtatccattaacagaacgggatcgggggaggaatataggagactctgaccctttgactgatgtaatattagagggggacttcatggccaatcggctccaggatttttcggcttggaacaagcttccttcaggtaactatcgtttgaaactttccgtgcgtgatagtttgggacgtgaagagaataacggggcatatggcagtgacagtttcatgctcttttcaaagagtgacaagtgtccggctgcgtttacagatttcttttattataaagaaaatgaggaatttgatgtacagcaccctgccgcttttctgttggggacttcttatcgggatgcatatgtgctgatggatgtattttgtgagagaaaacgcattgaaagccgtgtgttgcagttgaatgatactattatccgtatggaattcccttataaggaagcatatggcaagggaatcaccgttcttttcagttttgtgaaagatggtgagatgtataaccatcaggttgaactgaagaagcggcagcctgaacgtgctctcggcatgaaatgggaagtgttccgtgaccgtttgcatcccggacaagaggaagagtggaagctcgtcataaagacgcctcaaggtatgcctgctgcggctgaaatgctggctacgatgtacgacgcttcactggataagatttataagagtaaccagatactacgggtcttctatccggataatctgtatggagcattccgtggtgcgagccgttataatagcaattacttctccatttatttcccgttgaaggcttggagggttccggtgtggtcgtttgaccacttctgttctccttatatggatggaaggatgcggatagtgatggtagaagacaatgcgcttttggaagaagtaagtgttgtgggatatgggactacccggaatggctctttgaccggtaatcttagaatacgtggtgccaaccagccgatgcttgcttctaaagcagaatctgggaatgccgttgaagtgaaatatgttcctgcacaagtagtggaagatgttgtttttgaatcggaaacgataccggttggcgaggccttgcaacctattgagggacttcgcaccaattttgccgaaacagcctttttttatcctcaacttcgtaccaacgaacaaggggagcttgcattttcctttacgatgtcgcagagtttgacccgttggaatttccgtggttactcacatactaaggatatgctgactgggatgttggatgcttctgttgtaactgccaaggagtttatgctgactccgaatatgcctcggtttgtccgcgtaggagataaaacacagatagccggaacaatagccaatctgacgggtaaagcggtgaaaggaacagctgtattcacactgttcgaccctatgacggagaaagttattgctactcagcgtcagaaattctcagtagaagcaggaagaaatactgccgtcaacttccatttcgatgtgtccgactgctatgatttgcttggtgtccgtatggtcgctgatggaggcgcgttcagcgatggcgagcagcatctgttgcccgtattaagtaataaggagtacattacggaaacgcttgctatgcctattcgtggcgaagagacccgtacgttctcattagacagccttttcaatcgtaatagccgtacagcgacagaccgtcgtctaactgtagaatttaccgggaatccggcttggtatgctgtacaagcgttgccggcattgagcctgcctgccaatgataatgccatttcttgggctacagcttggtatgccaatagtctggcaggcttcattgccaacagccagccccgcattaagactgtatttgacagttggaaggctgccggtggtacgaaagaaaccttcctcagccagttggagaagaatcaggatgtgaagaatatcctgctcagcgagtctccgtgggtactggaagctactactgaagccgaacagcaggcacgtattgccacgctgtttgatatcaaccaactgaataaccgcaatctttccgcttttaccaaattgaaagaattgcagggtgaagacggtggatggagctggtataaaggaatgcccggtagccgctatataactggctatattacagaattacttgttcgtcttcctttgctgacgaaaaatgagctgcctgaagaagttgccgccatgcggcagaaagctttcggctatttgaatcggcaggctttggaagaatatcgcaatatccgtaaatctgagaaaaatggcgctagaattactgtcaactcggaagctgccatgacgtatctgtatctgattgctgtcagcggtgaaaaagtaccggctgcaaaccaggatgcttaccgttacttcttgtcgaaagttggggccaatcttaaagatggaacaatgagcagcaaggcgcagtctgccatcattctgaaagcggtagggcgtacagccgaggcgcatgaattcatcgcctctctcaaggaacacttggtacagacggatgaactgggtgcatactttgctttccaggcaaatccgtacaactggggtatgctacccatccctgcccatgtagaagtaatggaagccctgcgtatggcaggtggcaacgatgctttggtggaggaaatgaaactctggctgctgaaacagaagcagactgtcagctggaattctccggttgcaacggctgatgctgtttatgcattgctttgtcagggcactaacctgctggaaagccggggagacgtacgtattacgttaggcaacgaagttctggaaacattgtcgcctgcaaagaccataatcccagatttaggttatgtcaaggaaactttcattcaaggaagtccggagctgaaagctaaaaccgttacagtagagaaacgggatgcaggcattgcctggggagctgtttatgcccagtatctgtcacccatatccgatgtaaagcagcagggtggtgaattgaatgtagagaagaaactttatgtagagcgtatatcggccagtggcggcaagtccttgcaaccggttgcggaagggaccgtattatccgtcggtgataaaatagtggcccgtttgactatccgcttggatcgtgctatggattttgttcagttgaaagacctgcggggtgcctgctttgaacctataggctcgctttccggttatcgttggagtaatggcctcggttattatgcagaagtggaagatgccgcaaccaatttcttcttcgaccatttgggcaaaggcgtttatgtcttagagcacagttatcgcatagcccgtggcggaacatacgaaacggggctggccactatacaatgtgcgtatgctccggagtatgcttcgcattcggcgggagggataattgtaataaagtaacaatagagtatggagcgcaatttgtacaaattgcgctcctctattttaggtactctcgctaaaaacacctatttttgtccggctaatattgaataagagtagcagaattaggaaatcttgatattaaaaaatagatgaagaggatattgatcactttatatgtgcttgcaagtgtggcattggctgccgtagcgcaagctcgttttacctcgaatacagagatgtacagtttcggccagatagaatggaagcatcccgtgactgtgcaatataccatcaccaatacgggtgaccggcctttagtgcttacagaagtggagccggattgtgcctgctccgtagctcagtggacaaaaacgcctattgctccgggggcaaaaggaacggtgaatgtgacttttgacgccaaggcattggggcatttccagaaatccgtggctatttacagcaatgcgcaacccaatctggtctatttgaagttcaatggtgaagtagtacaggaaatcaaggactttaccaagacgcacccttatcttatcggccagatacgtattgacaagaacagcctcgactttcccgatattcagcatggtgagcagccggtgattcatatcggcgtggtcaatctttccgaccgtccttatgaaccggtactgatgcatctacccccttatttgcagacaaaagtagaacctaatgtattgcaaaagggagaaaaaggagtgattacacttacattgaattcggaaagactgactgacctcggactgactcaagcgtcggtctatctttctcgtttctccggtgacaaggtgggcgatgaaaacgaaattcccgtttctgccattcttttaccggatttctccggaatgacggaagtggagaaggaaaatgctcctgccatcaacctttctactaaagaagttgatatgagtgcgatattggccaagaagtcaaaagcacgtcaagatattaccattaccaataccgggcgttctcctttacagataaacaagctccaggtattccacccggcagtgggagttaacctcaagaagagcgtattgcaacccggcgaaagcacccgcctgcgggtaacggtagtgaagaagaatataggcaagaagcgtcgtcatctgcgtctgctgatgattaccaatgacccgatgcagccgaaagttgaaatcaacatcaagtaatgttctaatgtgaggaatgtgccaatatgctaatggagatagtagagattgtcataaaagcctattaatatattcagcacattcctcatattagcacattagcatattaaccatattagcacattaaaccatggaacatcccgaaaataatgaagcatataaaggcttggttgtcaatgcaggcattgagcaaccttcatcggtcaatccttacttgaagaaccgtcccaggcggaagaaacgcgagctttctgtatcagactatgtggagggcatagtgaaaggtgatgttacggtactcagccaggctgtgacgctggtggaaagtgtgaaaccggagcaccagactgtggcgcaggaggtgatagagaagtgtttgccctattcaggtaactctgttcgtgtgggcatcagtggtgtgcccggtgctggtaaaagtacctctattgatgtatttggcttgcatgtactggaggaacacggaggcaagttggccgttcttgccattgacccgagcagcgaacgcagcaaaggcagtattctcggtgataagacgcgtatggagaagctctccgttcatcccaagtccttcatacgtcccagtccctctgccggttcgttgggtggtgtggcacgcaagacgcgtgagacgattgtgctttgtgaggctgccggtttcgacaagatatttgtagagacggtaggggtggggcagagtgagactgccgtacattccatggtagacttcttcctgctgatacagctggcgggtacgggcgatgagttgcaaggtatcaaacgcggcatcatggaaatggccgatggcattgtcattaataaggctgatggcgacaatctggagcgggccaggctggcagcaacgcagttccgtaatgcgctgcacctcttcccggctccggagagcggttggacaccccaagtgctgacttattccgggttctataatcttggtgtaaaagaagtgtgggatatggtctacaaatacattgattttgtgaaagacaacggctactttgaataccgccgcaacgagcaaagcaaatactggatgtacgagaccattaacgaacagctgcgtgacagcttctaccacaatccgcagattgaagcgatgctgactggcaaggaaaaccaagtgctacaaggcaacttgacttcttttgtggctgccaagaacttgctggacacctattttgcagaactgaagaaataagggcatatccctttctctatatcgatgactaaggaaaacaacatggaagtggcgcggcggtttacccgccgccttcatgaactcccttctgaggagctggagctcattgccggtttgtttgtacgccgtgaggtgcacaaaggagaactgttgattagtgagaaagatatagccagggatattgttttcgtagagaaaggactgcttcgccagttctatttcaaagaaggccgggacattacagagaactttgcctgcgatggtgacggcgccatgtgtatcgtcagccttttcaccggacgccgtaattgccttcagttggaatccctggaggaaggcgtcatctggagcatttcgtatgcaggactggtcgaactctctgagcgctatctgcatatagcccgtctgcttcgtcatttgttggaggggtctttaatgctttcccaatataaggcagactcttggcgtttcgaaacctcacgcgaacggtatgcgcgtttcgtcagggattatccggagatagcccggcgtgcctcagtcaaccacatagcatcttatctgttaatgactcccgaatctctgagccgggtacgtgccggtgtgctgtgacggcggaatggctgtcctatacggctttcccttctttctcaaagtccttgcgtgacttgctttgtgtcacgatgtacactcccaggaataccagggctatggctatccccttttccaaattgaacactcccaagcctaagatgatggcaacggttgaggccacgatgggctgcatgtagttgtacatgctcaccacagtggggcgcaacagtctctgcgcactcattatgaagatataggcaaggaagcttccacccacaaccacatatcccgcttgcagcagggcggctgtggagatgctgctccactgtatggaagccacgtcgtggtaagagaacgggatgtagcacatggaggcatagacaaacatccatttgttcagggtgatgggagagtatttctgcgacaaccccttgaatacggtcagataaatggagaagctgatttgggcgagcaggcagagaaggtctccgataaggttgctattgccggcaccggtggtctggctgctcatgatgagtataaatgctcccatagcccctacaaagatacccagcactttcttgttggtgaccggttctttcagatagattgcagccactatcatggtgacgataggcagcgtggttgtaacgatggaggcgtctatgggcgaagtcatggagaggccgaagatatagacaccctgattgaataccagggcgaagagtgcggcgaagaatatcttcagcatgtcccggtggtccacctgttcgcgtttgcagaacaaggaaaggagccagaagcaggcggctgcgcctaccatgcggaatgtggttactgacaacgcggaaaactccaccagagccgacttgcctataggtgccatcaagccccataagatatttgcggtaagggcgaacagatgcccttgaatgttcttgttcatactcttttgttttttgcgggtgcaaaagaacaactattttctgaaaagagaaaatctttcattatatgatttttctggttcgtgggcgtagaaataagagattatcgtgtatatttgcttttaattaaagcaagaaaccatggaagtacaagccaattacatcaagcgtatcgaaatacacgaattgtggcatcggtacgatattgcctgggacctgcgtcctgacgtcaatatactttccggcatcaacggagtggggaagaccactatcctgaaccgttcggtcaactatctggaacagacatcgggtgaagtgaagagtgacgagaagaacggcgtacacgtctacttcgacaaccccgcagccacctttatcccttatgatgtaatccgtagttacgaccgcccccttatcatgggcgactttacggcacgcatggccgatgccaacgtgaagtcggaactggactggcagctctatctgctccagcgccgttatctggactaccaagtgaacatcggcaataagatgatagagctgctcagtggtgatgaagagcagcgcagcctagctccctccctttccctcccgaagcggaagttccaggatatgattgacgagctttttagctatacccataagacgatagaccgcaaaagcaacgacatcgttttctatcagaacggcgagcgcctattgccttacaaattgtcttcgggcgagaagcagatgctcgtcatcctgctgaccgtgttggtgcgtgacgatgaccactgcgtactcttcatggatgagccggaagcctccctgcacatcgaatggcagcagaagctcatcggcatgatacgcaacctgaatcccaatgtgcagcttattctcaccacccattcgcctgccgtcatcatggaaggctggctggatgccgtgaccgaagtgagcgagatttcatccctaatccctaatccttaatccctggatgcgtggctacttccctaagacataaccttacttcctcctatctggatgccgcccgcaagttgtctcccaagagggcacgcaggcgcatagtggcgtatgtggaaagctatgatgacatcgctttctggcggacgctgttgtccgagttcgagaacgaggaacgttattttcaagtgatgcttccctcggccacctctctggcaaagggcaagaaaatggtactgatgaacacgctgaatacggcagagctgggccgcagcctgatagcttgtgtagacagcgactacgacttcctgctgcaaggtgccaccaaggtgtcgcataagataaacaagaatccctatatctttcagacttatggctatgccatcgagaacttccactgctttgccgacagtctgcatgaagtctgtgtgcaggccacgctgaacgaccggcatatcctggacttccctgcttttctgaagcgttattctcagattgcctatccgctgtttctgtggaatgtctggttctaccgccagcacgacacacacactttcccgatgtacgacttcaacgcctgcgtgcgtttgcaggagataagcctgcgtcatccttaccgtagtctggacgagatgcaaaagacggtgtcggcaaagctgtccgaactgcaagcccgtttcccccactacatcgaccgggtggaacagctgggcacggagttggaacgtttgggactgactccggacaatacctatctttatatccagggacaccatatcatggattgtgtagtgctgaaaatccttatcccggtatgtaccgtcttgcgtcgcgagcgcgagcaggagataaagcgcctggcagagcataacgaacagttccgcaacgaactgacggggtatgagaacagtcaggtcaatgtatccgtgatgctgaaaaaaaacagcggctacaagaacctttatctttatcagtggttgaaagaagatatcatggagttccttgagcgggaggagcagtcgcgtagataagattgccgttatgataaacatatgattatggagatattgaagaagatagacgaccttttaatcgggtggggcatatccccttcccgtgccgacatgttcgaccagttcatagccttcgcactgatacttgccgttgcttttctggcggatgccctatgccggaaaattctgctgaaagtagtggcacaactggtgaagaagaccaaagctacatgggacgacatcgtattcgaccgcaaagtgatggtgcacctcagccgcatggtggctcccgtcatcatctatctgtttgtcccattggcatttgtcgaagtcggttcatcggcaatggattttatccggcgtatctgccttatttacattatcattactttcctgagcttcgtcaactccttcctgaaagccgtttatagcgtatacagcgagagggagcagttccgcgaccgccctttaaaggggatgttgcagaccatgcaggtcattctgtggctggtgggtggcattgtggttgtgggtgagctgataggccgcgacccgctttcgctgcttgccggattgggtgcttcggcagccatcctgatgctggtgttcaaggattccattatgggctttgtctccggggtgcagctttcggcgaacgacatgctgaaggtgggcgattggattgccatgcccaagtatggcgccgacggcacggtgatagaagtgacactgaacaccgtaaaagtgcgcaactgggacaataccattaccaccatccctccttacctgcttgtcagcgactccttccagaactggcgcggcatgcgcgagagcggtgggcggcgagtgaagcgcagcatcaatatcgacatgaccagcgtccgtttctgcaccccggagatgctggcaaaatatcgcaagatacaactgctgaaagattatgtggagcagacggaggaagtgattgaaaagtacaatgcagaaaacggcatcgataactccatcctcgtcaacggacgccgccagaccaatctgggtgtgttccgggcgtatctgacggcttatttgaaaagtcttcccgatgtaaatcaggaactgacctgcatggtgcgccaactccagcctaccgaccgcggtatcccgatagagctttatttcttctgtgcgctgaaggattgggtgccctatgaaggggtgcaggcggatgtgttcgaccatgtgctggcaattatccccgaattcgatttgcaggtattccagtctccgtccggcagagatttccagcggatactgcctgttgcttccgaagaaaaaggagcttgattccgaccatcaaaaagacctatatctattgtatttctcatagggagtcattacctttgaaccctatactgaaaggtcagaacatccctatcttttctcccaaaacatccccatgttttggggtattacatccgggtgttttgggtgaaaacatccccatgttttggggcaatacatccgggtgttttaggtattcagttatatagtgaaaggtattcggtcacggagtctttaccgtaaggtataggctttgtgtgcgtaggctgtagatgtgtttcacgccgggtgggaatatctttcgtttttttgctaacctaattaaaagaaagattggtatgtcaatgaattatgtggtccgcaagaaggtggacaagagtggagacaaggaagtggtgcgctactatgcggcatcaaaagtgcttcagcctgaaccggtgagcaacgatgaacttgccaagagactggcttttgtcagctccctgcaggtgggcgatgcccagtccgtgctggtgcaactgccggatattatagcggactatctggccagtggacgcacggtgaacatcaagggacttggaaattttttcccctccatcaccagcgaaccggtggaacggatagaggactgcacggcagataaagtgcgcatttcgcgtatctgcttcagggcggcaggcagtttcatgcagcgcgtttgccgtcgtctggacttgttcagctttcaggttcaagaattgaagaaggagctgaagaagaagtaaacggtatttttagtttctttcttgaaacagcacgtaccccttgaagcaggaaaggcattcgaggggcacgctgttgaagaagttgtgtgtttttttatagtcttgcgagtgcttctttttttacttcacccagcttccgttcatccagctgcattctttcctgatgtcctcgaaagagctgtagctcaggttggcgttcaccttgttgcttgtcacggcgatgaagtcggcatgggtgtagatgccttctttgctgctcagctcggcggtgagggtgatgttggtcagcttggaagtgccgttctttagggcgttttcggtaagggcggtttccacggtcaggggttggcctttgccgcagatcttggcgttgtctatttccacttccgtgccggcacgcagacggatgccttgcttgctgccgccgttgccgacgaggatgaggttcttcaatacggggtgggcaacgggagtggcggcgttgttgctgccgttgttgtcgcactccatcaggcagtcgcagtcgtagcccagtgtggattcggcttcttggtaagccacgaggttggtgcctttgccgttccagccttcggtccagtcgaaggagtcgtcgctacagcttacggctacgaggttgctcacgtttaccgagccgccgaagaactcaaagccgtcgtcggaacctttgtaggcttggcagtggtccacgatggtaccgttgcctacgccgtagaaagagataccgttggcttcatgctcttcatcgaaggcaaagccggtgtattccagacgaatgtattgcagcgtgcccgagttgtcggcatcatcgttgccgccgtaaacggcgccacctatttcagaacttcccttgccgccttcggcattggtgtgggcgcgtccgcagatgtggatgcctccccatgcgcccggttcttctttttcgctggtcattacgatgggtttgtccggcgtgcctacggcgttgattttaccgccctgtttcacgaggatgtagtctgcgatgtcatcgtagacggcgataatcttcacgccttcctctatgtggagcgtggcgccttcttctacgatgtattcgccgctcagcttgtaggtgtttccggcagccagggtcacgtcggaggtgatggtacctttcagtatcgtaccgttttcgatttcattgccgtttccgttgccgtcgttgccgtcattgtcgttgttgtcgtcgctgctgcaagcggtgaggatagacattccggctacaaaggccagagagtagaatttccatttcattgttttcatgattcaattgttttagttattatattcaattcatctgtctgtcattcagattgattctcttaaatcagcttgtttgtcaaagagtgttctccgttctcttcagggggagggtgggagactttataggttgtagcttattcccacctcaaagttcgttcccttgtggtagcgttccacttccatctcctgccccgtggtgggcacatcttgcttgaagatgacatcgcggttcagcaggtcgttcacttgcagcttcaggttgaagtgtttgttcaggctatatccggcgctgaagttcaacgtgtgcagcgtctgttgcctgacatcgcccaggcccgacacgcctaccgcatggatgcggctgccttgcaggttgtagagcagggcgaggttgagttgcctgtcttcaccgaagcgtggagagtaggtgaggtcggcattggcaaggatgggcgatgcgccttgcagcgaacgttccttgttggtgtaggcaccgccttggggcagcttcacgttggtgtacatgtaactgatgttggcacccaggcgcaggtctttgacgagccgtttgcgcatctccagctccacgccggcagccatgccgttgtcggcattcttgaaactgtgcagcgtggcgccgccttgcaggtcttggatgcgttcgatggggctgtcgaggtatttgaagtagcctgtcacggagagcatgtcgccgtccttgccgaagcgttcgtaacgtaggtcgaagttgtagttgtaaccgttctgcaactcttcgttaccgcggatttgtgccgaaccgtaggactcttggtagaggaagggtgccatctcgatgaacgaggggcgggtgacggtgcgcgaggcagagaagcggatgctgttggcggggttcaccgcatatttcaggttcagggcggggaagaggtcgttcttgtctaaattgcgtcgacgggagtaccagtcgccgccgtcgctggcgtagcgcacccattgcttgctcatttcgtagcgcaggccgaggttcaccaagagggcttcggtgggatagaaatcggtcagcaggtaggtggagtagatttcgtttccggcacggtagctgtctttgggctgcatcacacgctgtaccacgatttgtccgtcggcaatgttctgctggttgaggaagccgtcggtgttgtagatgtcggtgatgacggggttcagtttgttcaggttgtagtagaagcgggtagcgctatagtcgcggttcttgtccttgtagttgaagccgagcttgaggtggctggtgtcgttccacttccagcgcatggcgaggttggcgttccactcttcttcgtccaggctgccgaagtagcgcatggtctcttggcggttcagcttgaagagcctgaggctgccgtcgttgtccctgacgtacatcacttggcggcggtcgggctcttcactgccggtcttgctgtacgagcctccccaagtcagttgccacctgtcgctctcgccgaagttatggattccgttcagttgatggttttgcagggtgtatatgtgcatgatgttgttgctgccggtcagctcgtgtccttcggcatcagtaccttcgcggcgctgataggtgtcgatggcgttgcgggcgtagaagaaagtgtagcctatgcggtcgctccggcgcagggtatagcccaggtagccgagggcggcgagcttcagttcctgcgcaaagctgtcgtaggagaagtcgtcctgcacggtgccggtggcttcgagtgtcttgtagaaggcatcttccatgttctggtagccgttgctggcgctgaaggaggcaagcaggctgagtgtctggttgcctataccgaagttcttgccgaaaccgaggtttccgcccagttcgggcaacgaactcttcttgctggcggcaaaggaggtatcgaagatattgtgggtcttcacgtatttgtcaaactccatcaagggcatgtcgagggcggccgcgtctacgccgggtgtcttcaggagcgagccgctgcggtccatctgatagcggtctttgcctaaggtgttgaacttcccacccgtgttgaggctcagttggaagaaatcttccggtatgttttctttggtgctgatgttgatgtgcgcaccgctgtagtcggcaaaggcggctgcgtcatacactttactgacagtgatgttctgtacggtggacgaggggaacaggtcgagtggcaccagcttgttgtccgggttgggcgaggcgatgggcagtccgttcagcgtggtggtgctgtagcggtcacccagtccgcggacgataagctgtccggcgctggcgatggagatacccgttattttctttactccttcttccacattgccgatacctttgagggacatctctttggaaccgaggttttcgatggcgagggtcgctttttgccgttccatttgcaaggcgcgttcgccttcgaggttcttcttggcggtaacctgcacttcgcccagggtttgcgtgtccggctccatgtcgaagttaagcacggtttcaccctttatctctacggcttttatcgtcatgtctttgtagccgatgtaacggacggtgagggtataggtcccgtttttcagctccagtgtatagttaccatccaaatcggcgacggcgccttgtaccgttctgctcacttgcacggtggctcccgtcagcggttctttggtttgtcggtcggtgattgtccctttgatggttcccgccgtggcagccatgacggaaagtgtgaggaataaaataaggaagaaaatctttcccaagtctaatttcatgctcatctcttttctttgtacgtttttttaatccgctgcaaagatgaggcaatgacgttacaccggtgatacatggaacatacgtttcattttcaaatctattacgattcggttaccgcacatttttccggattgtttgttatccttatatataggctgcttgggacgaaaaaagtttctaatggttgcttattagagttttatggctatttttgtatctcaaaccaatattgataaatatatggctgttcatcgtgacgatagtgaacgtttccggcgtctttccatccttggccggataggttggtgggaggctgatttttcttcaaggcagtatctctgttccgaatatgtctgtaagttgttaggcttggaaggggaatacctgagctttgaggatttcggtaaaatgatacgcgaagactatcgggcgcgtatcagccgggagttccttgccattcagaatatggaggtctatgaacagacgtttcccatctattctaccgaaggagtggtctgggtctattcgcgcgtgggatacaaggagtatttgccggatggtacgttgaaggctttcggagtgttgcagcgcgtagagatgccgaaggaggaggctgcgaagcaggctttgcaaagagtgaacgatttgctttatcggcagacctcaatatcccattccctattccgcttcctgaaagacgaggatataagcgcgggcatttacgacatattgaaagatattcttgatttctttcgcggcggacgtgtctatatattccaatacgatgagatgtgccggtaccagagctgcacatacgaggtggtggctccaggagtggctcctgagaaagaaatgcttcagggagtccaagccgacagcctgccgtggtggacgtcacagattatggcacaaaagcccgttctgctggaaacactggggcaactgccggagcacgcctatgccgaatatgaaattctggcgaaacagaatataaagtccttgatggtaactccgctggttgccaatgaccaggtatggggatatatgggcattgatttggtagaccgtatccgaatgtggactaacgaggattaccaatggtttagttcgttggcaaatgtcatcagcatttgcatagagttgcgcaaaacgaaggatgaggctgtgcgcgaacgtactttcctcagcaacttgttccgctatatgcctttggggtatgtgcggatgtccattgtctgtgatgaaaaggacaacccctacgggtattatgtgacagatgcgaattctatctttgccgattttctgggaaaacccgcgtcggcgtttatcggcaagactgcctcgtctttttcaagggaggcggcccccagactggaatatctgcttgagatagtgaacaccgggacacataaggaaatggacatgtgttttgagctcaccaacaagcactgccatgtggtgatatactctccggaaaagaatgaagtggtggcgttattcctcgatacgacagactcggtacagactcatctggctttggaccatagcgaaaaactgttcaagaatatctttgccaatataccagccggagtggaaatctatgacaaagacggattcctggtagacatcaacaataaggatatggagatattcggggtccgtgacaaacaggatgtcattggagtgaacttattcgagaacccgaatgtgtccgcccaattggcagaacgtatacagaccgaggatatggtcgacttccgcctgaattatgctttcgaccggactgaagggtattactccacttccaaacagccgaaggatgtgatacatctttatacgaaagtgagcaaggtgtatgacagtaaaggtaactttaccggctatgccatgattaacattgacaatacggaacggattgatgccatgagccgtatctgtgatttcgagaatttcttcttgcttatatcggattatgcgaaggtaggttatgccaagctgaacttgcttgaccggaaaggctatgccatcaagcaatggtataagaatatgggagaggacgagaatacccagttggcggatattgtggggatatatagcaagatgtaccccagcgaccgcagaaggatgctcgatttcttctgtaaggcccgtgtgggtgaagccaaacattttcagggagagatgcgtattgagcgtccgggcgagaaggggaaatggaattgggtacgtaccaatgtggtcgtcaatctgtttgaaccggagaacggacaaatagaactgataggagtcaactatgatattacggaattgaaggagacggaagctatgttgattgaagccaaagagaaggcagaaaccgccgatcgtttgaagagtgccttccttgccaatatgagtcatgagatacgtacgcctctgaatgcgattgtcggtttctccagtctgatgggagagaccggggacatggaggaaaaaaggcggtatatggcgattatcgaagaaaacaatgacttgttgttgcagctgatttccgatatactggatttgtccaagatagaggccgggacatttgactttgtgaaaaaagagctggacgtgaacgtgctgtgtgaggacatcgtgcgcttcatgaagatgaaggctaaaccgggggtggaagttcttttcgaccgtcatctgccggaatgccggattgtcagtgaccgtaaccgtttgaatcaggtcatagccaactttgtcaacaatgccatcaagttcaccactgcgggaagtatctgtgtaggatatgacaaggtagatgaaactcgtttacgtttttatgtggccgatacgggcattggcatcgagccggaaatgcaggatcagatattcggtcgttttataaagctgaatacgtttgtacatggtacgggtctggggctttctatcagcaagagtattatagaacagttgggtggcacaatcggtgtggacagtgagccggggaaaggctcatgcttttggtttatgctgccggttgtatagtatgaaaatatgcccaaatacacactcaccacagattatgcagattaatataactcaaagctcttgattatcagaacttctaaagataatttgtgtcaatctgcgtaatctgtggtgagtgatgataccctccggttataatccgaatgagaacttatcgatggattgatataccacacttgcaatgctcagtaccacaatacccagcgtgcaaatggccaggctggcacgtgtatagttgtcgctgcggaatgctgcaatcggttcgtcgctcttgttgatgtacattgcctttacaatcttcagatagtaataaagcgagatgattgtattgataagggcaatgaataccagcagatggaagccgccttcgaaagctgccgcaaagatgaagaacttcgagaagaagcccgcaaacggcgggatgcctgccagagagaacagtgccagcgtcatcaagaacgccaacttcggattagtggtatacagcccgttatagtcttcaagtgtgaacttgcctgcccgcagtgccacaatcgtgataacggtaaatacggcaagattggcgaacatatatatcagcacgtagtataccagcgacgtcataccttgtgcgcttccgctgatgacacccagcatgatgtaacctgcttgcgagatactggagaaagccatcaaccgcttcaggttctgctggcgcagggcgaagaggttggcgattgtgatggaggcgatgataacccagtacagcacttcctgccattgctccaccatcggagcgaataccttgatgaggatagtcatcagtacgaaagcggcagagcctttagagatgacactcagataggctgtcaccgtgcttggagcaccttcgtaaacgtctgctgtccaaagatggaaaggcaccagtgatattttgaatcccatgccagagaagaagaatacgaatgccataatctgcaacgggtcaccggtgaggcgtgccggtatgtcggcaaagtagagagtgcctaccgtaccgtaaatcaaagataatccgtatagcagcaatccgctggagaacagtgccgtgagaatatatttggcacctgcctcggcagagtgatggcggtatttgtcgaaggcaaccaatgctgccattgggatacttgccgtttccaggccgataaagaacatcaggaagtggccggcggaaatcatgaagtacatacccagcagggtggaaagtgtcagaatgtagaactcaccttgtttgatggcagtgtccggacggcgcatccattcgtgggccatcaggaatacaatcagtgtacctatactgaggatggatttcacgatgctttgtataggctggttgtggtacatgccgccaaaggcatcggccataggaccgggaacgatggtgataagtgtatgtatggtcagcagaacaactggcagcattgtgttcagcaccggtttgccgtcattcttgtgtgcatccggactcatgaagaggtcggcgacaaaaaggatgacgatgaccaatatcagcgaaagctcttctttgagcaggaggaattgagaataatccatgactatgtatttattgttttacaattttctatttacaatttacagtgcattaactatcggcaatacgctgtctccaatcatgccgctaatccaccatggtgccataccaagggcggcaacgcatgctatgaggataatgaccgctgtgcgttcatcccaggtagcgtcgctcaaagtgaggtgatgtttgttagtgcaggtgccatagagaatctttcctaccagtcgcaggatatagactgctgtaatcacgatggaactgcatgcaatgactgtccacacgcggtggaacgtatcgggatgctggaacgaaccggtgaagatggtcatttcggcaatgaaaccgctgagtccgggtaatcccagattggcaagaccggcgattacatagcagacagccaggaaaggcataatcttcatcagaccggagagttcgcggacgtcacgcgtatgggtacgtccgtatatcataccgataagggcgaagaacaaggctgtcatcagtccgtgagagagcatctgcagaacagcacccgtgcaagctgtttggttcatcatcagaatggcgaacaacaccagaccgcaatggctgacggaagagtaggcgttgatatacttcaagtcggtttgtacacaagcggagaatgcgccgtatactacggagattccggtaagaatcaggaatatccatcccagttcctgtgcagcttcgggcatcaggtacatggctatgcggaaacaaccgtaacctcccagcttcatcaatacaccggcatggagcatggatacggcagtcggtgcggaggcgtgaccgtcggggctccatgtgtggaacgggaacagagcgcccagcacaccgaaaccgaggaaagtgagcgggaaccagatacgttgctgttcgatgggaatattgtgcatctgtgctatttccaatagattcatagaggtggctccggcaccgtagtagatacccaggataccgataagcaggaaggcggagccgcccatcagcatcagtgtcagcttcatggcagagtactccttgcgtcccgacccccatacaccgataagcagatacatgggaatgagggctacctcgtagaacatgaacatggtgaacaagtctattgagatgaagaacccgaacacaccgatggaaaggaaggtgaaccaaaggaaatattctttagtcagcggttgcagcctccaggaggcgaatgttccggtaaagacaatgatggccgaaagcagcagcatggctaccgaaataccgtctactcctaccgaatagtggatgttgagtgcaggataccaggccatgtcggcacggaacagcatttcatccgtggcaccggcgtggcgtgcattgaggtacattacggtcaatgctgcagaaagaaccagcagagccgatgcaccggtcaccatcaccgcacgtatttgtgcgatgttgcggctgagccaaagacccagcaacatcagcaaggggatgagtacaaataatgataaaaagttcatctttatatttatgatttaacgatttacgatttacgattgaaagatctcgggttatagcaatagtagcagtatcaatgccagcgtgcccagcaggaatacaaatgtatattgctggatgcgtccgctctgcagaccgcgtatctcgtcactggtagcctcggcactccaggcaaggaagttgaagaagccgtcgaccacgtggcggtcccaccaggcgatggggcggcagatgcagccgaagatgatgcggtgggtgatgaactggtaaacttcatccaggtagaagcggtggtaagctgctgtccataggcctttgaaacggcgtgccagtgcgttggcaacgggctgccggctacctgcatagatgtaggtggcaatggctatggcaaccactgctacgacgatacttgtacctgccacactccaatcaagatggatgctatatgcttcaccgttggaactgatgaagtgtccgaaaggaatgaaaccggcaactatcgtaacaacagccaggagcatcaggggcaaggtcatcgccagtggactctcgtgggggtgaggcacgtggctgtcgcccccatcacttgccgacttttgtcccggctctgagccggcccaaaagataccataataaagacggaacatatagaatgctgtcatacctgcaatcactgtcataatccatcccatagtggggctgaactggaagcatgccgtcaggatttcatctttggagaagaatccggagaacggcgggatacctgcaatggcaaggcaggcgatgaggaacgtgatatgcgtaatgggcatatacttccgcagtccgcccatggcagacatctcgttactgtgtacggtatggatgatgctacccgctccgaggaacagcaatgccttgaacatggcatgtgtgaacaagtggaacatgcctgccatgtagcccagtcccccttcgtgcgggtcggctgatgtacatacacccagcgccaccatcatgaaaccgatttgggagatggtggagaatgccagtacacgtttgatatcactctgcacacatgccacactggcggcatagaatgccgtgaaagctcctacgtatgccacgatgtgcagcacgctgggagcatactctatgaacaacgggaacatgcgtgccaccagatagacccctgcaaccaccatcgtggcggcatgaatcagtgcactgactggcgtaggaccttccatggcatcgggcagccagatgtgcaacgggaacatggcactctttccggcgccaccgatgaacatcagtcccaaggcaagcggaatcatggccgcaccgccctttgccagcgccatctcattggggctgaaggtgtatgtgccggcataatatccatagacaaggatacctataaggaaacctaggtcagcaaaacgggtaacgataaatgctttcttcgaagcagcaatagctgcgggtttcgtatagtagaaaccaatcagcaggtaggaggacacgcccaccaactcccagaaaagatacatctggaagatattcgtagccactaccagtccgagcatggacatggtgaagagcgacaagaaggcgtagtagcgctggaaaccgcgttcgcccttcatgtaaccgaaagagtatatgtgtactagcagcgaaacggtgctgatgactacgagcatcatgaccgaaatcgggtcaagcagaatgcccatgtcgatactgaggctttctgtgaagggcagccatttgaagttatagggcatcagcgtctcgtacgtaccgtcagcaaggcggggagcgctgaagtacattcctgcggtgagataggaaagcactgcgaccaggcccagtactgcagttccgataaggccggcaatgcggtgcgacatccatttacctccaagtcccagggcgaggaaagagaggaaagggagcagaaggattaatattgtatattccatatatactatgtttatcaattattactattcaagaaacatcgtttggcgattttggctcttaccatttcatctcatccagtttgttcacctggatgctgcggatgttacggtagatgttgatcatgatggcaatggctacagccgtttcggccgccgagatggcaatggagaataaagagaagaaatatccttccagtcctccagggaataagaaacggttgaacaccgcaaagttgatgtccgtggcattcagaatcagctcgatgctgataagtatcgccagtgtgttgcggcgggtaaagaacccatagatgcctgcgaagaacatgatagccgaaactatcagataatattccatgtgtatcataattcttatcttttacgtgctattaataatccgcctacgatacatgccaataataaaatgctgacagcttcgaagggaagcagataaccatacttgtcaccgctcagcatgtggtgaccgatggtcttgatgttgacttccaaaggctccacgtcggtagtggcaatgaacttatgctttaaagtgatgaatactacgatgatggcaccgcccacggtggcacccagtccggcaaggaatctgctacgctttaacttctcgatgacatcgccttcgccactggtaagcagtatggagaagacgtagagtaccacgataccgccggcatagaccataatctgcacggaaccgaggaaggtgtaacccagcagaaagtagatgcctgccgtaccgaaaagcacgaacagcaggtaggtggccgagcgcaccatgcggtgggtcgttaccgtcaagatggaaaatacggtgataaaggccgcaaggaagtagaatactactgtttcaagagttatttccatgttgtttaattacaagttactattaacgaattactttgttgtctcttctttgggagcagcgggtttctttttttcttctacatggctgcccggacggttcagcgtcatgaccagtttcgtgcggtcgaacacagcatgctcaaaatcctggtcgaacgtgatggcatcgtgagggcaggcattcacacagagttggcagaacatgcacgaaccgaggtcgtactcgtacttagccaatatcttctttttcttgccgtcttccgtttcaatcatctcgccggtcaccttgatggtgtcgttgggacaagccatctggcacaagccgcaagccacgcaccgatgttcatttttgtcattatggggcatggtcagcgtgccacggaaacggtcggagagtttcaatgtcgagcggttttccggatattgttcggtagtctttcgtcggcagaatacggtcatggttgtcttcatacccgtcagcagagaagtgacgccgtgtatgagtccgccgatataagagttcttttctttcattacttttgcctttattaaaattatccgcaaggaaatcttgctccggcgctacgccggttagaaatgcaatttaaatactacaattaataccatcaaaatcaagttcaccatagagatgggtaccaggtacttccactccagattcagaatctggtcaatacgcaggcgggggaaagtccactttatccacatcagcaggaagactacgaagaaggcctttccgaagaaccatacaaagcccggaatgtaatccatcactgcgttgaagccgtccagacctacgatgtgtagcggcatccagcctcccaggaagatggtggctgccacggaggctacgataaacagattcaaatattccgccagatagaagaatccgaagcccataccgctgtactccgtatggtatccggcagtcaactcgctttcggcttcgggcaagtcgaagggaccacggttggtttccgcatttccggcaatgaggtagatgatgaaggctatcaatgcagggatatgtcccttgaagatgaaccagccgtcagcttgtccttctactatttcggagaactgcatggttcccatcaacactaccattgtcagtatgctcaatccgcaggacaactcgtagctgataatctgcgcaccgcttcgcatggctccaatcagcgagaatttattgttggagctccagcctgccagcaggatacccactacgccgatactcgatgcagccagcaggaagaacactcctacattgaagtccaatacctccaatcccttgttgatgggcaggcaggcaaatgtcaggaaagaagcgatgattaccatgaacggtgccagattgtagaggaaccggtcagaaaatttcaaatcaatgatttccttcgtcaacatcttgatgacgtcgcagggcacttggagcaatccccatttccccacgcgcatcggaccgaggcggcattggaagaaggcgcatattttacgctccatgtaaatcaggatgatggcaagcacggcatacatcaagatgatgcatacgccaatcaccacgcattcgaggaatattgccagaccttccggcatcagggaagtcagcatctggtgtatccagttggttactatactaaagtcaaacacgttgttcatttactatttactatttacaatgtacaatttacgaggcgctttttgatttacaatgtacaatttacaatttggctgcgctgtaattccgcatggtaaattgtgaattgtcaaatcgtaaattcttttatctatcaatatctggtactacataatctaatgttccgccaatggcaataaggtcggcgattttagctccgcggcaaatcgtgtttacggtcgataccaatggcaaacccgtactgcggaagtgcaggcggtaaggcgttttgtcaccgtggctttcgaggaagacgccgaattcaccgcggctaccttctacggctgcataataagtgccttccggtacgcggataataggtttcatcttttcctggtaggctccttccgggatgttgtctatcagttgctcgataatcttcaggctctccaaaatttcatccatacggataaggtaacgtgcccatgaatcaccttcggtgcggatgacttctttaaagtccaccttgtcatatacggcatacggcatacgcttacgcacgtcgcaggcccatccgctggcgcgtccggtgcctccggtagctccaaaggcgatggcatcttcccgtgagagtatacccacacctttcagacgttgctgggcaatgatgtttccggtgaatacgtcgtgatattcgtgtaggataccgcggaggtaggggatgaactccttcactttctttacgaagccgggagcaatgtccgcctgcacgccaccgatggtgttgtagttcatgatgaggcgtccgccacaagtttcctcaaagatgtcgagtatcttttcgcggtcgcggaaaccgtagaagaaggccgttaatgcacccaagtccatagcaagacaagagtagaacagcagatgagagtctattcgctgcaactcgtccataatggtacgtatgtactgcacgcgttcactaacttccacgcccattgccttttcgatacacatgcacaaggcatggcggttctggtgtgcacccagatagtccagacggtcggtcagagccaaagtctgcggataggtcaggctttcgcacatcttctcgataccccggtggatgtagccgcagttggcatcaatcttgtcgatgacttcaccctccaatgatacacggaagcgcattacgccgtgggtggccggatgttggggaccgatgttcaccacatattcttcatcaccaaaaagttgcatctccttatttttgatgctaccgtcgggattcagctccaactccatggtggtgtctaccgtttcttcgttgtccatacgtaacggattatctttttccggttcattgtccttacgcatgggatagcctacccagtcattgcgcagatagagtcggcgcatatccgggtgaccgatgaaaacgataccgtaaaagtcgtagacttcgcgttcgttgaaatccgcagctttccagatatcgctgacggaagggagttcgggatgttcccggtttagagtggcggtacgtaccgctatccgttcgccggtaacggtagattccaacagatagactacaccgagtccgcggggagtgtccggtgtgtctttctcgtcgggtattccccaatccataccgctgaggcattccagaaagtccatctgtttctctttccgcagacgcagcatttcgtcgtgcagggctgagggctctatgtattttatttccatatatttaagtgctgattagtggttttcttcttttctgtttactccaccgaagtatttttctattttcactttacgttgcaattgcatcatgccgtagtagaatgcttccggacgcggagggcaaccgggaatgtagacatccaccggcagaatcttgtccacaccgttcaccacatgataggatttcttgaacgggcctccgctgacggcacagccgcctacggctactacatattttggatcggccatctggtcgtaaagacgtttcagaacgggagccatcttgttggttattgtcccgcaaaccataatcatatctgcctggcgcggactggcacgggctacttcgaacccgaagcgcgccatatcatagcgggctgcgccgagggccatgaattcgataccgcaacagctggttgcaaacgtaagaggccacagtgagttgctgcgtccccaattgacgaaatcgtccagtacgccaagggcaacattggcgcctccggcattaagttcccgaaccagtttctccaacgtttcgttgtctgtaaactcctcataagggatagatttaattttcggcttctttgttacttccattccaaagctcctttcctccaggcataagcaagacccagaatcaatataatcaggaaaaataaaacactgaaaagtcctgccacgccaagttcgcgggtgatgactgcccaagggaacagaaataccgtttccacttcgaacatcaggaacaagatggcaaacagatagtaacctacccggaattgcatccacgatttaccgcgggtagggatgccacactcgtacggttccatcttctgtgcattgtacgaacggggtgctatcgcattggagagcgcgatgacgatacccacgaaagcgattgccgtcaataagacgaccactaacaaagtaaagttcataaacctgataagattttagatatataataatagatacatcgtaccagaggacaaaaaactgaatgttgtccggggcgaggtcaaggggcaagcatttgcgcttgcaggccttctaaatgataatctttcttagtccgaacacataatagtttgcgtcgggtacgggatgaggagacagatttaacaaacggtcgcattccggtgcataagcatactgctgcatcttgtagatgtacatgcgcaggagtacgtttttattggttggtacttgcgtatgatccacatgctctatgcagagggagtttggtgaaaacaagtcgtagaacttctggactacttgttgggtggtaggagcttgtgacagcgtacagcattctgcttgtcgggtggcaggaacacacaaaatgtccgcaactcctattgcactgtcgtgcaatagggctgcaaagataatgattaaacagtatttgatgcattgcttcataccacaaatctctctttcaagggcgcaaagatataataagtcttgctcattttgctatccccgcataacaaaaatggttatttttacactttttatcctaaatcaatttcgtttccagaaatcaggtgtgaaaagcagtagtacggtgaataactcaagacgtcccagaagcattaaaagggataatagccatttagctgcatcgggcagggcattccacgaataggcaggtccggtttcacccaatccgggtcccatattaccgatgctggaaataacgcagcctattgactcttcagctccgactcccatagtcatcataagcagtgtgctgataactataatggtgatataaataaagcaaaaagccagtacggtggagacaatggaggaagatatgacttgcttgtttattcgtaccggaagtatggcattggggtgtaggatgtgtttgaattcgttccgtgatactttggtaagaattaccatacgtatgcatttcaagcctccggtggtactgcctgcacacgctcccatcagcatgatgatggtaagtaggccccataggacgggcgaccattgcatgtagtcatccgttgcaaagccggtggacgtatgaagggaaattacctggaacaaggatttgcggaaggattcttccatccccatgggactggtataatagagcgcgatggctatgactgcagtgaaaaatacgactgagctgaaatagaatttcagctcggcgttgctgatgaatttcttgaatttccggttgacgaacaataatactaaagtgaagttgataccggagataaacatgaagatggagatgacatattctatataaggagaattatagtaggcaacgctggcctgcttggtagagaatccaccggtgccggtagtggcaaatgcatggcagatgctgtcgaaccagtccatgcctccaagcatcagcaggcagacaagtaaagtggttatgccggtatagatgctccaaatccacttggcggtgataccgatacgcggatgaaccttgtcatgtgtggggccgcttgcttcggctgcgaatacctgcagaccactgactccgaagataggaagcactgcaatggtgaacatgatgattcccaagccgccaatccactgtgtcatgctgcgccagaacagtattccatgaggaagtgactcgatgtcgtccaaaatagtggcacccgtactgctgaaaccggacatggtctcgaagaatgcatcggcaatgtcgggtatgtatccgcctatatagaaaggcagcattccgaaaagagagaatgccacccaggcaaagctgaccagtacatatccgtcacggcgcgtcagttgccgttcacctcctttaccgagagctgccaacaataagcctatccctgctgtgatacctcctgctttccagaaatcgagcatatcgctttctctgtagtagaaagacacgctcgaacagaccagaaacatgactgtttccagcaatagcagaataccgataattcgtatgattgtcttgaagttaatcatttaccaacgactcattctctattagttaaagtatttttcgattttcttaatcatcatgtttagacagaataccaccacatggtcacccggttgtatcaaggtattacccataaccacgacgccttccccctgacggataagtccgccgatggtggttcctttcgggaggccgaggtcttttaccggatgtttggtaatctttgagccggccttaacggtaaattccgctacatcggcattggcaaaggtcaggcatttcacattgctgacgtccgcatccagcatcatctgataaatgtggctggcggcaatcatctttttgttgatgacagtgccgatgtcaaggctttcagccatgcctatgtagtctatattctccacttctgctacggttttgctgactcccatgcgtttggcggcaaggcaggctagaatattggtctccgaattgccggtcaaggcaacgaaggcttccgtgtttttcagtccctcttccacaagtaagtccatatcccgcccgtcgccattgataatcatggtgcggtcgtcaagcaactcggtcagacggttgcagcggttcaagtcgttgtccacgattttcacctgcatgtagtccgggacgtattgggcggtgcgtacggcaattcggcttccacccataatcattacgttgcgcacatcagcataatcttccttgccagctattttgcggatgtaggggacgtatttcctgatggtggtaaagtatacgatgtcatgtagcttgatggtatcgtcaccgcggggaatcagtgtctcgcttccccgtttgatggctaccacgtgatagggcagctccggtccgcccagtttgtggagagggatgtccagtatctcggctttttcgcgtattttggtgcctatcagtatcaaggcgcctccgcagaattcccaccattggcgtacccagctcatgcggatggaggatacgatctctttggcggcaagcatttccgggtagatgagtgaatcgacacccagcttctggaaaaattccttgtttttgggcagcaggtattcgtagttgtcaatgcgggctacggtcttctgtgctcccagattgtttgccagcatgcatgcggtcatgttccggctttcatcaggggtgacggctatgaacaagtcggcttctctcactcccacttctttcaagccttttatggatgtaggggaggccgtagccgtcattaagtcaaagttggagtttagggtgctcaacttttcttcgttgtcgtccatcagaatgatgtcctgcttctcgcgggacagcaatttagccaagtgtgtgcctactgcgccggcacctgcaataattattttcacttttaattagttgatagttgataattaatagttgacatatggggtagatacttaaacggtcaattttcaactatcaattatcaattgattatagattccttcttcgtccattccgcaaagatgatgcaactcttgtatggtgccgtgctctatgaaggtatcgggtacaccgatacgtctgatatgggggatatagtcattgtctgccatgaactccagtatggcactgcccattcctccttttttgacaccgtcttctatggtgacgacatgctggaagttgagtcctacctcgtgcagcaaggcttcgtcgagcggtttgagaaaacgcaggtcgtaatgggctatggagatccctttgtctttctctgcgcgctctatggcacgtgcggctacgttgcctatgggaccgagggtgatgactgccaggtctttaccttccttcagtttacgccctttacctacggggatttcttccagcggacatttccagtccagtaatacgccgcgtccgcggggatagcggatgacgaacggacctttgtctgacaattgtgccgtgtacatcaggcggcgcaattcatgttcgtccatcggtgaagatatggtcaggttgggaatcggacggaaataggccaggtcgaaaactccgtggtgggtcggtccgtcttctcccaccagtccggcgcggtccagacaaagtacgacggggaggcggagcagggcgatgtcatggatgacattatcgtatgcccgctgcatgaaggaggagtagatgttgcagaaaggttgcattccttcttttgccataccgcccgagaaagtggctgcatgtccttcggcaatacccacatcgaaggcacggtcgggcatggtgtccatcagcttgttcatagagcagccagtgggcatggcgggggttactccgacgattctcggattttcctttgccagttctaccagtgtttccccaaacacgtcctggtaaagcggaggcaggttgctggtatctgccttgaggcgttttccggttttcggatcgaacttgcccggtgcatgccagatatcgggattcttctcggcaggttcgaatccttttccttttacagtgtgcagatgcagtattttcggtccctgcatatctttgatgtcccgcaggacacgggctatgtttttcacatcgtgtccattgataggaccgaagtagcggatgttcatcccttcaaagatattctgctgctgggcggccattgatttcagactgttggcaaagcgaatcagcgctttgcggcggtcctcgttcaaaagtcccattttgaatagcagtctggaagttttgaagcgcagctggttatagcggttgctggtagttaggttgaaaagatactgcttcatgccacctacacttctgtctatcgacatatcattgtcgttgagaatgataagaaggttgtttggggtggacgaagcgttgttcagtccttcaaaagctaagccgccgctcatgcttccgtcgccgatgatggccactacatggcggtccttctcgcctttttcggcagcggcaacagccatgccaagggcggcggagattgaatttgacgcatgtccgcaggtgaatgtgtcataatcgctttcctctggtgagggaaaaggacgaactcccttgaatttacggttggtggagaatgcttcacggcgtccggtcagtatcttgtgcccgtatgcctgatggcctacatcccagactatgcggtcgtacggagtattgaatacgtagtgcaaggcaacggtcagctctaccgtgcccagactggctgcgaaatgtccggggttacacgaaacctcctttataatgtcttgcctcaattctttacagacttcaggaagctcttctacgctgagttggcgtaaatcctcgggaaatgtaatggtgctaagcaagttatatgttgttggttctgttctcatttctaatctgaagattacaaaatgcaaaaatagcaaaagaaaacggatgacgggaagttttagaaggaaaaaaagcctcttttgttcacttctgtttttactttctctgtataaattgcatttcttgttctgcctataattaaggaaaaagatgcctgatggtaaatcgttcctccatggagaaaatattgttccatcctggtagaaaaatcgttccaccatggtggaacgattttttctccatataggaatgatttagttttggcaagcaaagatattaatcctttcaaagattgacttgtactctcgtatgtgtgcatctatgataagagatgctttaaacttaacacttgttgaaaaatgcaactttgcaaactatttattgcaacttttttaggagcttggactgttgttaatataatattatctatatttgcaaagtagaatatgtcctatttatcaatatgttatacgattatgaattgtacatgatggcattcttagttgtaatatgtgccggaatggggcgtaaccacgaattgctaaatgaataaacaatgaatgatatgaagaaaaagtttaactttggaattttggctattgtgagcgtagtgtttttttccgcttgcggttctgatagcgatctgttcgacccggaaaaggcggtggctaagaaagaggcacagtatgcatcggctttcgtgcggaagtatggaaaaattgcagttaatcaggattggggatttggggtaacaccgacaacgcgtgttgctaacactaatagcaatcaatggagagattttgcggaagtaccggggagtgttacggctatagaaaaagaagtggttacgaaatggtttgaaacacatcagaatccacaatccattggtgtggattggaccgacttttttgttcaacatgtaagtggctcacgctctgatatggattttttggttgcggcatcagatgatcatatcaataattttaatgctgctgagggagctataatgctaatgcagaatagtgggacgtcttcttttggctatagggcttctctggatagtaaaatgcactataattatactatacaatatattgagggtgcttattatgtgggatttgactttgaagctaccggccagaacccaaatcaacaagtagctgcagatgggtattatagtgattggattgtaaagatctctccggccgtatatacaaatgcgtacagaatcatagcggaagaccttggagacagtgacgattttgatttcaacgatgtcgtgtttgatgtagcgaccaatggaggaacaactatcattaccctgcaggctgcgggtggtactttgcctttgtatattgaggtaggcggtgatagtcgtgaagttcatgagatctttagtgtttctagtactacaatgataaatacgggtgctggagcaactaaggctccggtgatgtatagagttaacggtactggtgccgtaaatatcaaagtggaaggtcaaaatgctgaagtatatacactgaaagcggaggtaggcaaagctccgcagaagatacgtgtagagacaagatatgactggacttctgagcgtcaggctattaataataaatatccagattttgcaaattgggtggctgatcctacggttaattggtattaatggaatatatagtatttaaggtaggtgatataatggaaggttatattacctgccttttttatgtttcgaccgttatatattgaaatttactatctttgtggcgtagcaagtaggttggtacatcctttttcccgaatgtgaatgtttttttattccgagcttatgaatctttatacgcctgtagaagtagtttccggtatgccccttctttcgcaagagaataatctgttgctgatgggttcttgttttgcatccgagatgggacaaaggctggcggatgccaagttctgttgtgacgtcaatccttatggtgtgctttataatcctttttccatttctgtggcattgcgtgaaatcattgcgggcaaatgctacaatgaaaacgacattttcctctttcatggactttggcacagtgccatgcatcatggtagcttctcctcagtctctgcagaggaaacattggcaggtattaacggacgtttgaaaagcgcccatgaaagattggatcggttggattgtctgctactgactttcggctctgcttgggtatatgaaaataaaaagacgggaactatagttgccaactgccataagcaacctgagtcttgctttactcgtcacatgctttccgtcagtgaaatagtgtctgactacacctctttgctttccggtttgctggcgcggattccccggctgaaaatattgtttaccgtcagccccatccgccacgtgcgtgacggaatgcatgccaaccagctcagtaaagctaccttgctgcttgccgtgaatcagttgcaagccactttcccaaaacatgttttctattttccggcatacgagctgttgctcgacgagcttcgtgactatcgcttctatgcagaagacatggtgcatccttctgaaatagccattcgctatatctgggaaaggtttattcggtcgtgcatctctgccgatgcgttacggattatggaagaaagtgaaaatatccgtaagatgttgtcgcataagccattttatcctgcttcagaagagtataagcgttttttaggacaaattgtgttaaaaatagaccaacttaacggaaaatacccgtacttagatttccaaaaagagagagaaatatgtcgtattcgattgaaagcataaccgaaagtattggcgcacggcgtgtgggaaacgtgccggctaccatagactggctgctcacagacagccgttccctgaattttcctgaggaaacattattctttgccttgaccaccaagaggaatgacggtgcgcgctatatcgcagatttatatgcccgtggagtacgtaattttgtgcttagcgaagaaagctttagattaattgagcatggagaattgaaaattgataatgatgcgcagcaacccgctatccattttcaatcttccactgtcaactaccttattgtttccaatccgctgaaagccctgcaaaaactggcagaacagcataggaaccggttccagataccagtcatcggtattacgggaagcaacggaaagacagttgtgaaggaatggctgcaccagttgctcagtccggaacgtgccattatccgttctccccgtagttataactcccagattggagtacctttgtctgtgtggcagatgaacgaacagtctgaacttgctatttttgaagccggtatttccgaaccgggggaaatgcgcgctttgcagaacatcattaagcctaccataggcatcctgaccaatataggaggggctcaccaggaaaatttcttctcgttacaggagaagtgtatggagaagttgatgcttttcaagaattgtgatgtagtgatttataatggtgacgatgagttcgtcagcaactgtgtggcgaagtccatgctttctgcacgtgagattgcgtggagccggaaggatatggaacgtcctttatatataagtaaagtggagaaacaggatgactgtactgtcatttcctatcgttatctggatatggacaatacgtttaccttgccgttcatagatgatgcttccatcgagaactcgctgaactgtctggccgcatgcctctatctgatgcttcctgccgaacggattacggaacgtatggcaaagctggaacccatcgccatgcgtttggaagtcaaggagggaaaaaacaactgtctgttgattaacgacagttataattctgaccttggctcattggatattgcactcgattttctttaccgccgttcgcaaagtaagggattgaggcggaccttgattctttcggatatattggagaccggtcagaatacgccgacactttaccgacaagtggcacagctggtaaacagccgcggcattgaacgcatcataggtgtaggaaatgaaatctcttcctgcgctgcacgctttaatatagagaagaccttttatccggatacggcagctttgatacgcactatccagcgtggggaactgcgccttgaaaacgaaattattctgattaagggtgcacgtaagttcggttttgactccttgacggaagtattggagaagaaggtgcacgaaactatcctggaggttaatcttggagcgatgattgccaatctgaactattatcgtggcaagttgaagccggaaacaaagatggtctgcatggtgaaagcctccgcttacggtgcaggttcttatgagatagccaagactttgcaggaacatcatgtcgattatcttgctgtggcagttgccgacgaaggctccgaactccgcaaagcgggtatcacagcgaacatcattatcatgaatcctgagatgactgctttcaagaccatgttcgattacaagctggagcccgaagtatatagcttccatctgctggacgctttgattaaagaagcggaaaaggaaggtatcacaaacttccccatccacataaagctggataccggtatgcaccgcctggggtttgctccggaggatatgccccggctgatagaacggctgaagggacagaatgccgtgattgcccgttccgtcttctcacatttggtagggagcgattcgcagcaattcgacagttttacacgccggcagatagaaatgttcgaaaaagcgtccatggaattgcagggagcttttccgcataagatacttcgccatatctgcaattctgcaggtatcgagcgtttcccgggggcgcaattcgatatggtgcgtctgggtatcggtctttatggtgtcaatcccatagacaattccattatgaataatgtgagcacgttaaagactaccatcctccaaatacgtgatgttcctgaagaggatacggttgggtatagccggaaagggcatctcacccgtccgtcacgtatagcggctcttcccattggttatgccgacggtctgaatcgccatcttggaaacggacatgcctattgtcttgtaaacggccaacgggctgtctatgtagggaatatctgcatggatgtctgtatgattgatgtaacggacatcgattgcaaggagggtgacagtgtggaaatttttggtaatcatctgcctataaccgttctttccgatgcgcttgcaactattccttatgaggtgttgacaagcgtttctacgcgggtaaaacgtgtttattatcaagactgaagatagggggcagggattaggggatggagattacaataaaattaatccctaagttcaagcggataatgcaacaggagtgagaatgatgacaatgagaagatacgaaaagaataatttttcagaggaacagagaaagaagatttctttcccttttgttcccctgtggaaaagttgtttctttgcatcttccagttccccaacattcagttgcaatatgaaacagctaaccgaagaacaaaggtataacatttccgcttatctgcaaagcggaaagtcaagaaccgagattgccaatcttgtaggagttcatcgtagcactataagtcgtgaattacgtcgtaatagtgataaacgtaatggcatttacaaaccggatctcgctcaggctaagtatatgtccagaatgcgttcacgaaagcacttcgtgaagtttacggacgacttgaaaattcaagtagatatactcataaagaaagatttcagtccagaacaagtgactgggtttatgcgaacaaagggcttggaaacagtttctcatgagacaatctaccagtatatttgggaagataaaaagcatggagataagttgttatacaagcatttaagaagacggggaagaagtcataagaagagaggtgcattgactaatggacgtggttttatcaaaaaccgcgtggacatagacaagcgtcctacgatagtagacaagaaagtacgttttggtgatttggaaattgacacagtcattggaatgaatcacaaaggagcactattaactataaacgacagggtaactggactagtatggataagactacttagcgggaaagatgccagcccgctaactaaagctgccatcgatgccttggaaccttttagagaccaaatacatacaataacggcagataatggaaaagaatttagttttcacgaagaaattgcacgtaaactaaatatttttgtttactttgcaaaaccataccactcgtgggaaagaggagccaatgaaaacagcaatggtttgattaggcaatacttcccgaagggtacggactttagggacataaccaatgaacaggtaatgcgcgttcaaaacatcttaaactcaagaccgagaaaaagattgggttacatgaccccaaaggaaaaatataaattattaactaacaatgaattcgacactgttgcattgtctgtttgaattcaggatccttaatccttaatccctaatccttaatttttctatctttgcattataattaatcagatataactatgacaaacttacttttattaggctttctgcccagcggctccgaatggataattattgcattggtcatcttactattgtttggcggtaagaaaattcccgaattgatgcgtggtttgggcaaaggagtgaagagcttcaaggatggtgtgaatgaagccaaagaagagataaacaaggctcaggaagatttggataaaccggctgaaaagaaataaaaggatttactatttgactatttacgatttactatttgatactctgtaaattgcagaagtatggggagatttgttatctttcattccactgcgtagcccaaaatagtaaatcgtaaaatagtaaatgcattggtgtttatggcagaaaaagagctaaccttttgggatcacttggacgagttgcgccgggtactgtttcgtgtgcttggtgtgtggtttgtattggctatcggttattttattgccatgccttatctgtttgacaacgtgatactggctccttgccataacgactttgttttctatgacctgctccgttggatagggcagaaattggatttgaaggatgaattctttactcaagagtttcatgtgaaactcatcaatatcaatcttgccgcaccgttctttgtccacatgtctaccgctttctggatgtcggtggttacggctgctccttatatattctatgaaatctggcgctttgtaagccctgccctttatccaaacgagcgtaaaggggtgaggaaagcgctgggtataggtacggtgatgtttttcatcggtgtgtcgctggggtattttatggtctatccactgactttgcgtttcctttctacttatcaattgagtgcagccatcgagaatcaaatttccctgaactcgtacattgacaatttcatgatgctggtgctttgcatggggctggcattcgaactgccgctggtgacatggctgctttccctgctgggactggtgcacaagacctttttgcggaaataccgccgtcatgctgttgtcatcattgttattgcctcggccatcattactccgaccggtgacccgtttaccttgacagtagtggcggtgccgctttatctgctctatgagttgagtatcctgatgataaaggataaaaaaactgatgatgaagcggaagaagtggagacagaggaatgacggattgtgaagtaaaagaatattttagtatattgcaggaagcctgccacgttgaggaaagctccctggatgtggcctatcggcaattgcgcgaattgctggagcgtttgtgccgtacacagatgcccgacggaagcttgcagatgacggacctttctgcacgtatcagtttcgtggcttcgaaggccggactttccaccgtggaacagaaccgtctgcataccttccggctgacctccaatgctattctgaaccgccagacggaaccgcaacgtgaacagttgttgcgtgatgccaagacactggcattctttgtcaagcgcttgacaggggaggagatacctgccgggctttatcgcctgctgccccgtgcggatgccacctatatagtggcgccgcccgccaaagagcagataaagcgcatgcgcgtctgttttcagtatgccgatgatacttacttatatgtactgccagtagacactgtggccgatgagccgttacgtgtccgttacaatgtacctcagattaatgaagagtttgcagaaacctgccggattctgtggcggcatgcccaggtcaatctgctggatgttacggtggacgaagccggcatacttactccttcctttattgtacttgagcccgattacttgatagacatcagttcgcttgccgaatgctttaaggattacggacatcatcctgccaactatatcctggcacggctccagtcgccggacaatacccgtccgttactgttgggtaatattgccaacctctttctggacgagtggattcatgccaaggaggcacccgattatttggcatgcatgaagaaggccttccgttcttatcccattgagctggcagcatgtgccgacctgcgcgaccgggagaaggaagccgaattcttttccgattgcaagcgccatttcgacaatatccgccggacggtgacagaaacattccgtgcatccggctatgaactcgataggactgatgccgtgctggaaccctcttacatctgtgaagcattgggtttgcaagggcgtctggactacatgcagcgggatatgacctcgttcattgaaatgaagtccggtaaggcggacgagtattccatccgtggtaaggtggagcctaaagaaaacaataaggtacagatgttgctctatcaggctgtgttggagtattctatgggaatggaccatcgacgtgtaaaggcctacctgctctatacccgttatccgttgctttatccggcacgtccttcgtgggcaatggtgcgccgtgtgatggatgtgcgtaaccggattgtagccaatgaatatggcatccagttacggaacagcccgcagtatacggcagagcgcctgaaagacattcatccggacaccttgaacgagcgcggtttggacaataccttgtggaaacgtttcctttacccttccatcgatgccgtagcgcaacgcatccgttcgctttcgtcgttggaacaaagctatttttatacgctctataattttataaccaaggaactctatacctccaaatctggagatgtggattatgaaggacgtaccggcgctgccgccctctggctttccacactggctgagaaatgtgaggcaggtgaaattctgtacgatttggctatttgcgagaatcatgcggcagatgcgcataaaccgtatttaagcctctccccccgtaccccctccccggtagggagggggagggaatactccgcggagccgggagtaggggggagtttgcccaatttccgtcagggtgatgcggtggttctttacgaacggaatacggataccgacaacgttaccaacaagatggtattcaaaggtaatatagagcgcatatccgatgacgaagtctgcatccgtcttcgtgccactcagcagaatgcgggtgtattgcctgctgctagcctttatgccatagagcacgactatatggacacctcctttcgtagcatgtatctgggactttccgcttttctttctgccacccaaagacgacgtgacttgttgttggggcagcgccctcccgaattcgatgcttctttggatgccgctattgcgaccgctccggatgatttttcgcggattactctgaaagcgcaggctgcccgcgactatttccttttaatcggtcctccgggtaccggtaagacctcccgcgcgctacggggcatggtagaagccttttaccgggaggggaaacagattttgctgctttcgtataccaatcgtgccgtagatgaaatcagtaaggcgctgacctccattgagcctgaaatagactttatccgtttaggcagtgagttgtcttgtgatgagtcattccgcccgtatctgattgagaatgtgctggaaccttgtgccactcggcggcaggtgcaagagcgcattgcccgttgccgtgtttttgtcggtacggttgccacgctttcttccaagaccgagcttttccggttgaagacttttgatgtagcgattgtggatgaggctactcaaattttggaaccacaactgctgggattactctgtacccgtaatcctgcaggcgcggatgccatcggcaaatttattttgataggtgaccataagcagctgcccgcagtggtcttgcaatcgtccgagcagtcggaagtgtgtgacgaagctttgcaggccatcggattgtataatttgaaagattcccttttcgaacgcctttatagaaacctctccagggagagcgccaatcgccagacatcaacctctcatccttcatcccttatccctcatccctcctatgacatgctctgtcgtcagggacgcatgaatatcgaggtagctttgtttcctaatcgtgctttttacggtggtctgctggagccggttggcttgccgcaccagcagggtgagctgacccttgctcctgaattgtgtgattgtgagtttgccggcttgctcactcgtcgtgtcgcttttctgccttccgcagtcgaaccgccggcacagtcggccaagatgaaccattcggaggcgcggattgtggcacggttggcagcggctatctatcggcagtatgcggctgtttccggtttcaacccggctgtcactttaggtgtcatcactccttatcgcagtcagatagccttgattaagaaagagattgccgctttgggtattgctcctttggaggatatattggtagacaccgtggagcgcttccaaggtagcgaacgggatgtcattatctactctttctgtgtgaaccgggcttatcagttgaagtttctggcaaatatgacggaggaaaacggtactcggattgaccggaaattgaatgttgcccttactcgtgcccgcaagcagatgtttatgacaggagtgccgcaactattgaaacttaaccctatttatgccgagctcttgtctgtagtttgccattcgtaaccgtcttattagtaaatcttaaatattctctgcttctttatagagtttattaataacgctgtgtgggataaaccattatctttgcattacgtttttttcatagagatttagatttaaggttagaagaattgtggaagtcgtgagacttccctttttttcatcttaaattgtgttccatttacagttttttgtttttgactgtaattgaacaaagaaaagccatttcgtgagaaagggcttttttgtgcggagtttgcaaggcatgtaatgcagtttgcaaactccgcatgattttgaatatctataaagagacttctgattagtccactataatcggtttgtacttcggaaccagtgccttcatgatgcaccagcctatcaggtaggacactgcacatatacagaagatgatgaaatatccggcaggcttgccctgaaatccgagaaataccatttgtgtcttgtcggcatagtcgaacagcaaaccggaactcatgttgatgaggaatgagctgataccgcccgccatacctccgattcccacaatggtggcaatggtgctcttgggaaacatatcacctaccacagaatagatgttggccgaccaggactgatgggcagcgcctgcaatacctatgatgataatcgggaaccaataggcttgttcgccaaatacttccttgttgcccaatggctgtgcaaacaatgccaatagcgggaacagtgcaaagatgaacatggcctgcatgcgtgcggcgtaggggttcttgccggtcttgttgataatgatggtgggcaattttccgccatagacggacaacatcgtgatggcatagagcacaaagataagcatctgtgccgtgggagtatctgaggagaatccgtaaacgtccgaaatgtatgcgggtgcccagaagaggaagaaccaccatacaccgtcagtcatgaatttgccgaaaaatacagcccaagtctgcggatatttgaaacattgcaggaaagaaatgctcttttcgtccttggttgccggagtagtcgcctttttatcctcctctttgtcttgttctatatatgccagctcagctgcgtttacgtgtggattttcatcaggtttcttgtacatgaacatccatagtcccatccagatgaaacccaatccgccgataacgataaaagccatttcccagccgttgcccacgcccatgcgttggaagtagcgggccagggtagggatacacaatggggctatcagtgctccgatggtagagccggcattgaagatggaagtggagaaggcacggtctttcttgggaaaatattcggcggtaaccttgatggcggcaggaaagtttcctgcttcaccgatgcccagtatgatacgggcggcaatgaagtagtaaacactggtgatggctatggtagaggccaatgcaccggtagcactaatcatgttggcggcattttcaatgccgagggtcacttctgtggcaagtccgcaaagggcgtgcatacaggcgccggtggaccatacggcgatggcccataaatatcctttcttcgttcccatccagtcgatgaaacgtccggcaaacagattgcctaaggcatagacgatggaaaagatggccgtgatgtagccgtagtgtgtatcggtccagtggaattcgggggagataaaatctttccaggtcaatgaaagaacctggcggtcgaggtagttgacggttgtcgcgaagaatagcatggcgcagataatccaacggtaattggtcatccgccctgcggtgttttgaaatgtactcatgataatagatttatattttgatacaaatgtaggtttgtgtgttgttcgaggtgtaatattgggtaaattaggatgctgaaaatgacaaaaataggcatggattatttaagtccatgcctatcgggcgctacagggcaactttatttcatatcgatgtatttgatttcgtctttgtcgctgtatttcaggttttcaccgcccataccccaaatgaaagtatagttgctggttccggcagcagcgtggatagaccattcgggagaagtgatggcttgttcgttgtgcagccatatcagacgttcttcctgcggttcgcccatcaagtgacagatagcgttgccgggtttcaggttgaagtagtagtaagcttccatgcggcgagtgtgtgtgtgggcaggcatggtattccatacagaaccgggagccagttccgtgagtcccatctgtaactggttggtaccaccgtctttcactctttccagtacatctttcacaatcagctggtttacgatgcggtcgttactgtcctccatttttccataatggtcggagatgcccagtgcatatttcttggggttggctttctgaagcttggcatcggtagtaatcagctgagtaacatagggcttgtaggccggagccgagttgatgtagaacttggcgggattggtagcgtcgttgctcttgaaggttacttccttatttccgcagcctacgtaaagggcttccttatacttcatggggtattccttgccgtctacagtaaccactccgtcaccgccggtattgatgacacccagttcgcggcgttcgaggaagtaagtgatttccggacccagttcacggaacacttccaatttcaatgtcttgttcaccggcatggcgccaccgtaaatcaaccggtcgtagagggtgtaggttacgttgatttcatccggagccatgactttgtccatcatgaatctgctgcgtagaagttccgtgtcataatgcttcacgtcctgcggatggcaggcggtctgcactttgtaattcacttgggcattggctgccatggcagctgctcccatcataaatgcaagtactaactttttcataatccgttactatttaacttttaatttttgattgatttctggtatttgataatggcacgacggttcataatcatcaggaacaatgtgcataatacaaggataccggagcctatccatttcaacgagtaggtcaggtggaaaatgacccaagcgaaggggctggatgcaaagtccagtgtgccgccttcaaagccggcagggatattcacggcagcgtcttgtgtcttctcgtatacatcgtgggctgcttgtgtgaaatagggggcgaggtctgttacgaaataaagaccgatggtcagtacaacgagtccgatgatgaatgtctttactacatttcctttcgtgatgggcagtaccagcgggaagaggtagaacattccggccagcgacgccaaaggcaggaactggttacccggcaggatgacagccagcagtatggttacgggaatcagcagcagggaaaccaccagcgttgcaggatggccgataaccaatgcggggctcataccgatattcaggccgacagcacctttgaatttcttggcaatcagctcgcgggtagcatcggaaataggtttcaaaccttcgatgaacaaagcggtgatacgcggaatcagttccattacggcgcccatcttgatacccaaacctaatatataaggtatcttgtctaccagttcctggctgttcttgcaagacaaggcaccgataccgcaaccaaccagaatacccaagaacagaggctcacccagcaaaccgaatttcttcttcatgccttccgcatcgatgttcaatttgtcaaaaccggggattttgtccaatgctttattgatgactacggcaaatggtacgaaacctgcgcagaaaggctggggaatggagataccctccatcttgtcgtagaatccttggaatttgtcggcggtatagtcggccataatcagggtaatgatgtagcagatgatagcggcgaagaagccccaccagatattgtcgctggcaaaataaacgactgcgccgataaatgcgaaatgccagtagttccaaaggtcgatattgaccgtacgggtcgttttcgttaataacatcagaagatttactcccaaacataccggaatgatgaatgcacctaccgatgtgttataggctacagcaacagctgctggccatcccatgtcgaatactttcagctgaagaccataaatttcaacgacttggctcagagcaggaccgaggctgctggtcaacaatgcagtgacaactgacagacctacgaacccgacacctaccagcagaccgctctttaatgccttactgaatttaataccgatgcatactcccaaaattgtaaagattataggcatcatcactgctgctcctaagccgatgatatagccgaaaacttgttccattctcttgtgatttaattaggtaattgagcttgtttttgcaatagtatgaattaaaaaccgggtcaaaaataagaccttttctcaattaatcaaacttgaaaagcataattattagtaaatggaacaattttggacgaaattggtcgttatcgtgcacaaaattgctcgttttcgtacacgaaaaccaaataacacatcttctacgttgaaaactacatatccgtttggaaagaaagcattacttttgttttgggaaataaaactgttctaatacaaaaaatgaatgattgcatgaagaaagattcgatttgtaaatttattgtatctgcatgtatttcgattaagagagtcgggggaggaaactaatcctcgtgtacgtgcctttttctccaaattcgggtggagtgaactttcataccgttcgcagtgttattataaaacattgaaacaaaccggactataatgatatatttgatttttttattggcaataggactattggtcggatggagcttatggaaagctccatctgatattgatttatggggaaaagatgtggaggattgatagttatattggttatattctgaaaatttacgggcatgcctatcttgtgatggggggagataaaggtgtgatgtgggaattgttctgaccctacatatcttgggtgatagttgttgtcatcacttcctgttccttatcacctcggggagggagtgccctctcaaagagcagcgataacggcaatgtccgtagcattgtctacgatatgtgccggatgaaactcttccagttctgtgcggggacggaatccccaagtgactccgcaggcggtgactccggcattggcggctgtctgcatatccactccggagtctcctacatatagtacgtcttcacgggatatccgggtgatgtccagaatgtcatgcaccactgttgggtcgggcttcacgttgaccccttcccgctgtccgaagacggcggtaaaacgtatgttggggaaatagtgtgaaatcagtttcacggtagccgattgatatttgttggaagccactgccaatatcatctctttctcctgcaactgttccagcagttcggggatgccggggtaagggcggcttttatctgcattgtgcacgtcataataaggcacaaacttcttgcggacacgcaggacgttttcttcgctcttttccccttctgggagggcgcgctcgaacagtttgttgattccgttgccaaccatgaagttataggccgattccgggtgggtgggatagccgagcgcttgcagggcatggtttgtactttgtgccaaatcggctattgtattcagtaaagttccgtccaggtcaaatataatcaacttcttcattgctttctctattttttagtttgctgcaaatatagggctttttgcgctcatgttcaaatgctgcctcgggtttcatcaggtatttgcagaatagcaagccctgggctgataatcagtgcattattactgcattcctgttgcatgcgttttgcagtagtactgcagatggggtgcagcgttactgcaaatatgtttgcagtgatactgcaactgttttgcagcgtgactgcaacagtattgcagtggcactgcacaagcgttgcagtagttttgcagtgggtgattggtgtattttttgccgttcttcccttttctttgcacactttcgggctttttatgcaaaaacttcctatctttgcagccgaattttactaaaaataggtatgagttacaatttgttgaaaggaaaaagaggcattattttcggtgctctgaatgagcagtccattgcctggaaagtagcagaaaaagcagtagaagaaggtgcaaccatcactttgtcgaatacgccggttgccgtacgtatgggcgaagtgtccgctctttcggagaaactgaactgcgaggtgattcccgcagatgctacaagtgtagaagatttggaaaatgtattcaaacgctctatggaagtattgggtggcccggtcgacttcgtgctgcactccattggtatgtctcccaatgtgcgtaagaaacgtacatatgatgatttggattacgatatgttggaaaagacgctggatatttccgctgtctctttccacaagatgatacaagctgccaagaagctcaacgccattgccgactacggttcaatcctggctctgagttatgtggctgcgcaacgtacgttttacggttacaacgatatggcagatgccaaggcactgctggaatctatcgcccgcagtttcggttacatctacggacgcgaacaccatgtacgtgtcaacaccatttcccagtctcctacgatgaccactgccggttccggtgtgaaaggtatggacaagctgttcgacttcgccaaccgcatgtctccgcttggtaatgcttctgccgatgaatgtgccgactactgtatcgtcatgttttccgacctcacccgcaaggttaccatgcagaacttgttccacgatggaggtttttccagcgtaggtatgagtcttcgcgccatggctacctatgagaagggtttggatgagtataaggacgaaaacggaaatatcatctacggctaatggaaatcgcactttatcttttgcctgtcaccttgggcgatacgcctattgaagcagtgttgcctccttataataaggagataatactgggaatccgtcatttcgtcgtggaggatgtgcgctcggcacgtcggtttctgaagaaggtggacaagggaatagatattgatgcgctgacattctatacgttgaacaagcatacgtcgcctgaagacatctccggctatctgaagccgctggtggaggggcagccgatgggcgtaatctccgaagccggttgtccggctgtggccgatccgggagcggacgtagtggctattgcacaacggaaaaacttgagagtggtccccttggtgggaccttcttctattatcctctctgttatgggttccggtttcaacggtcagagctttgccttccacggttatcttcccattgaaccggcagagcgtgccaaaaagctgaaaatgctggaacaacgcgtctataatgaacatcagacccagcttttcattgaaacgccttaccgcaataataagatgatagaggatattcttcataactgccgtccgcagaccaagctctgcattgcggcgaacattacttgtgaaggggagtatatcaaaaccaagacagtgagggagtggcagggaaagactcccgacctttctaagattccttgtatttttctcttgtataaataatagcttccaggtgctcgaattcatattccaggcaactgctgaagaagttccgtcccaggttgtgttccatttgctggaacgtccatagctttccacccttgaaattcttattgcataagatggagtcatcgtccaggtctagcgtgaagagatagaccaggcggtcggtggcttcattctcaaaatgatacatgaagttgaagtgcaaatggtctaatggggcggtgggaagcgtttgccgtaaaattctgtgtgcgccttgttccaatgtttctccatatatcaggtaaccctccatcagtaagtcgattttgtctttctcgaaaacgttgcatttggggcgggggaggagaaacagcatgccgtgtgaggcaacggcaatccggatgaccggattgatatagtcgtttttccggttgatggcttctgaagcgatggctttccccatgacatctcctttggtgttgactatcggtacgaaaaccgtgtggttcatcactatattgaaatagaagataccgaattggttgaacagaatgcctaatataaagacgaggggaggcgccacataaaacagaatgtggcgggtagtgtctcccaaagggtaactgaccagaatcgccaaggagataatcagaaaatgcagcaggcttatgataaggattacgcgtgaggatacgatggcggcttctgccccttgtgcaaaaagctgcttgcagcatttctgtgtctgagacatgtggtagtccagaaattttctcctattgaggtagatgacgaatgggggaatgatagcgctgatttccagtgtgaacggaagcataaaacgtggacagtagtttacgaggaatagggttgttaccgataatagcagtaacattccggtagtgcagtaaagtatgatttgtggaacatgagtccctctatgcctcaccgaatagatgctaaagaagagtcctacacctgtaccgatgtagatggacatgtcctgcgttataaactcgcataatatgatggatattataacggggatgaatcccagcgacatattgaatcttgatgatagaattctttgatgattcattatccgtattatgattttgtcgtttacatcataacaactgggagatttaaatgtttcctgttttacttcttttttgtataaaatgaatctgtttttctgcatgataggaggagcgtaccaatggggcgctttccacttgctgaaaccctttttccaatcctttctctttgtagagtgcaaattgttcgggagtaatatatgccgctaccggataatgtttgtgtgtgggttgaaggtattgccctatggtcagtatgtgacagcccacttggcgaaggtcgtccatcagttcttccacttcttccggagtctcgcccaatcccaccataatgccggacttggtggtggtattgctttctgcaatctgccgcaacacttccaggcttgtctcatacttggcggcactgcgcacgagggggctgatgcggcggacagtctccatgttgtgcgaaatgatttccggttgtgcatcgataacttgtgccacgagctcctttcttccctggaagtcgggaatcagcacttcgacggtggtgtccggattgagccgcttgatttcccggatggtacgtacccagtgcgatgcgcctaagtcgggcaggtcgtcacggtctacagaggtgacgactgcatgggagagtttcatcaaggcgatggattctgccacatgtgtaggctcatcggcatccagcggcaagggcttcccgcttgccgtgttgcagaacttacagcaccgggtgcagatatttcccccaatcatgaaggttgcggtgcctttcccccaacattcccccatattggggcaacggccgctgctgcagatggtatggaggcaatgcgactcgacaatgcgtttggtctcggtatagcgctcgttggcaccgatgcttattttgagccattcaggcttacgtactctttcaggcattatttcaattctttgttgaagaagttggtcaaccgcgtatataggtgtaaccgggtatttcctccgtagatactgtggttgcggttggtgtaaacctgcatatcgaactgtttgccgagctgtaccagttgttcggcatattcggcacagttctggaagtgtacattgtcgtctgccatgccgtgtactagcagcaggttgccgtgcaacttgtcggcacgggtaaaggcggaactggccttatagccttcggcgttttctttcggtgtgcgcataaagcgttcgccgtaaacggtgtcgtagtagttccagtcggtaacggcagctacggctactccggccttgaataccggtgttccttcactcatactcataatggtcatgtatccaccgtaactccatccccagattccgatgcggtttttgtccacataaggctggttgcccatgtagagggcggtttccacctggtctttggcttccttgatacccaggttcagataggtgcatttggcgaattcggcaccacgtcctccggtgccacgcccgtctacgcaaaccacgatatagccttgcgatgccatgtaggtttcccagcttacactgaacttgtcaagcacttgctgtgaaccggggccgctgtactggtacatcagtaccgggtatttcttgccggcggagaagtcggcaggtttcatcatccagccattcaatgtggttccgtcggaagtctggaaagtgaagaattcctttcgtggcatgtcatagccactgatttcctgcttcaatgccgcattgtccatcagggtggcaagagtcttgcccgtattgtcgttcagtgtaatgacggtcggagtatccagattggaataacggttcatatagtacttcatgttcgtactgaactgcgcactgtttgttccggcttgtgacgatagcctggtctttttgcctttccggtcaatcttgtagatggcactgcgcatggggctttcctcgttgctgctgaagtagaagcttccttcttcggggtcataacccaggaactcctgcacttcatatggtccggctgtcacttgtttcagcagattgccacctatgctataccagtacagatggttgtatccgctcttttcgctgacaaagctgaaattttccggatagaagacgatgttgtcgaatacattctcgcggatataggtatcgctttcatcacgcagagccagtttggctaccgtgctgcgagggtcggcaaagtataggtcgaaccggttctgatggcggttcagtgtcatgacggcaagcttgttggggtcttgggtaaagcggatgcggggaatatagccgtctgcatctaccggcacgtttatcttgcgggtcactttcgacttgatatcgaaggtgtgtacggacactttggaatttacttctcccgttttaggatatttgtaagtatactctcccggatacttctcgaaaggggtgaagtggggggcttgtccggcaaaaagagggaaagagtaggagggaacatctttctcgtcgaagcggatgaaagccagcatctggctgtcggcactgaattccagcgcacggttgaaggagaactcctcttcgtaaacccaatcggggatgccgttcagcacctcgttctgttttccgtcttccgtcacctggctttcgctgttgccatagagcagtttcacaaggaagatattgttgtcgcgtacaaaagccacctggttgccgtccggtgaaaatacgggcacctgctgcgggccgccgtccgaaagtttttccacaatattgttgattttaccgtccagattgcgcttcaggctgtagatgtaatgcacagccgtataggaatggcggtagatgggagttgtttcggtggcaatgagcagtttgctgccgtccggagcaaagctgtagctgtcaaatgtcttgaacgtgcattcgcgtgcggtagcggcatcaaacagcacttccacgggttttcccgttttgaaggagtatttgatgatttgtgtcctgtccgcattcatttgcgaataatgttctccgtctcccgggatggggataacgccggaaatgttcttcggagtgaacttgcccgatatgatttctttcaaatcgagcgccttgccaccttgggcgaaacctgccagcgtacagaggcagaggagaagtgcgatgcttatctgtttcatatctatcttttatgcttatctgtttccatcttttttctggggaacaaatatacaacaaagggaagatttatcgaagcagtgggccgattttattctttttgaacagaaaaagcccgtcctgctccttgggggcgaagcagtgacggacgtccgtcactcatagatgatgattggatgagatgatgattggaatatctttcgttacaagcacttgacttttctttgatattctgcaatggctgcatccagtcgttcgtgggcggttgtgtcacccggaacgttgtgcgacggatggatgtacaagtgtacgccacggtcggcaaggatttcggcaacggtagtgatggtcatccataccatggtgacgaaactcaatgtagacaacggacctaccttgtcgaagtggttcttcaaaggtacggaggcgtctaccaggggaacgcaggaatccactacgatatctgccaactggaagaggttctttccgctggagtggcggctggccttgtcgcccgtttcgctggccgaaccgtatacaataactttcatgccgcgcttcttggcttccaatgccatgtctatattgacggcattgataccggtatgtgagaaaatccacatacagtctttggaatcaaaatcatagttcttcataatttcctggccgtagccttctgcccgttccaggaagaggaactgatgaatacccatctggccgataatctgcgtgaagaatgtcagaggcaattcgcaaagcgggtggaatcctacaaagctgccgatacgcggatacatttcttctacgggaatcgttgcgtggccgcaaccaaacgtgtggacccaacgaccggcttcgatggagtctgccataacagtggctgcttttttgatgttttccaactgggtagcttccagcttttccataatgccatgggcattctttaaccattcgagtgctaacataacttttttgttttttaagaagttaataaatttatttgagtgagcgtttatacaaaaggagcatgacggcaagtgaggcaatcatcagataaggataaagcccgatgccattggtgtattgggaaaccattcccatcaggccattcattgcagtctggccaatgagggctatggcaagcgccacgctgaatgctgttcccgataaggacgggtaccggcttccaagaatgctgagtatcacgggatacgtggccgacagccccatacctaccagcaccatgccgactgctgcgcgtgcaaaacccggcgagaacataaggaaacagaatcctatggcagtgagcgtaaggctgtagggcagtacggtttccggttttatcttcttgaatatcgcaacctgcaccatacgtgccacggtcagtcccgctaccatgcaggtcagtgcaatcaatgcctgattggccggaatatccgtcatctgcccaaagtaacttgtggaccaattgttgcagacaccctcaatgccgctttggaaaaaaagaatgaagctgagtagcagtaagctgctttctttcagcagtcccaatccctcttttactgggaaaccttgtgcctgcttaggggcggggaagcgtacggggatgcagaatataatgcccgcaagcatcactacaccaattcccagcaagatggtttcgaatgaataatgcttggaaagggagcccagcaacatcggtatgcccaatgcgcccagtccgtagaacatgcccagaaagctgagacgcgaccctttctcggattctcccgagatatcggataccaatgcattggtttctccgttgaggatgcctccgcccaagccgatgccgacgatggaagcttgcagtaatggcacactttcaaagaaggcaagtccttccatccccagcagtacgatgatgcagctgggcaccagcagggctttatgtccgaaccggtctacgatgggaccgaaaatcagggaaccggccagcatgcccagcggcaggaaagtggccagtgaggttgtctgcaacccgctcagattcagcttggctatgagggatggcaacactgctcccaatgtaatcatggagactccgaagaaacacatcccgatgcacgctgccgtgaatacgagattcttgtgataactgttactcatacaagtgatttttgatggcaagaaacgctgctcctatcagtccggcattaccggacaactgagaaggtacaaattccacctgcttgatgctgagcggctgcgcccatttgcaggcttccttataaatgtcatctataaagataccggcagggccgaagacgcctccgccccaaattatcttctgcgggttgagcaggctgaccagatttgcggaagccatgccccacatctcgacggctttgtgcaatacggagatggcgatagggtctttttcattataggcactgaacacatcataggccgatatgcggcagatgggtttctggcgcagtttccctttgtatgccttgttggcgcgtacggcatcgcgtacccgtgccccgataccattgccggaagcgtaatattcgaaacatccgcatgcgtcatactcttcccggtagggaggttgcagggccatccagccggtggcgccgataatgtcgttggctccgtgcaacacgtgcccgtcgatgatgatgccggcaccgataccggttcccacggcaatgaatatggcactgtgacattctttggcggcaccttgccacatctctccatacatatagcaggtacggtcgctgtcgatgtatatctcgatgcccggaggcgttacactgcgcagctcctcatagagggggtagttatcccagcccggtatgttgggggcccatacccggttggtttgggagtaaacgataccggggatgcagacacctattccgtcgatgtgtatacggcttctgcgtgctacggtaagaagtttggcgaggatatccgcggcgagcttgcccacttcgtgaccggttcttcctttcaggagccgtttgcggttaaacatcatgcttccgtccggaaagaaaatggcgctggctatttttgtgccgcctatgtccaatgcgattgttgccatggtgttatagtatttataggttgattcattaaggttgtatgcaaagctatgaatttatttcattcttgaggagtataaactgaggaaattgtgtgtaaaaagagtgtctaatcactaaattgtgtttaatttaattgagcttggatgtactctttctcaattaattagttatatatcagtagatgaaacattttttagtgcaggcggaaattctttgttttatgttcgttaacaaatcaagtggaaagtattcttgtttttgcaggttcatcccacggaaaaatcctatatttgccacttacataaggaatatgtatggaaaccaaatctacgctctataatgagttccctttttttctgaagcgatattttccctataaggtacagaaaatatcgctgcatgccggttttacgtgccccaaccgggatggaaacaaaggagtcggcggttgcacctattgcaacaaccagaccttcaaccccgattattgccgtacggagaaatccattacccgccagctggaagagggcaagcagttctttgcacacaaatatccggagatgaagtatctcgcctatttccaggcctataccaatacgtatggcgaattggaagacctgaagcggaaatacgaggaggccttgtcggcagacggagtggtgggcctggttatcggcacccgtccggactgtatgcccgacagcttgctggactatctggaggagatgaaccggcatacattcctcttagtggagtacggcatagagagtaccgacgacaagacactttgccgcatcaaccgcgggcatactttccatgccgccgccgatgcggtggaaagaaccgcttcacgcggaatcctgaccggtgggcatgtcatcctcggactgccgggcgagacgcacgaaagtatcgtagcacaagccggtgtattgtcccgcctgccactcactaccttgaagatgcaccagttgcaactgataaggggtacccgcatggctctggagtaccggcagtatcctgaagattttcatctgtttgatgtggaggaatatatcgacctcgtgatagactatatcgagcatctgcggccggacttggtgctggagcgtttcgtctcccagtctcctaaggaactgctcattgcacctgactggggactgaaaaattatgaatttaatcatcgggttcaaaaaagaatgaaagaactcggtgcatatcagggaaagaagtatgaaatgtgagaaaaaagaattatttttgccgcaactttaaatatggaatcaatctaaataaagaataattatgaacccaaaaacagtgataaaaggaaaaatccactacgtgggagtgaatgaccgcaataagcatttgtttgaaggtatgtggccgttgccgtatggggtttcctacaactcttacctgatagacgacgaaatggtcgctttggtcgatacggtagacatctgctacttcgaggtgtatctgcgcaagataaagagtatcatcggcgagcgccccatccaatatctcatcatcaaccacatggaaccggaccattcgggttctatccgtctgataaagcagcattaccccgacatcatcatcgtgggcaacaagcagactttcggcatgatagagggcttttatggcgtgacgggcgaacagtacatggtgaaggacgaggattttctggctttgggacatcataaactccgtttctatatgaccccgatggtgcactggcccgagacgatgatgacttttgacgaaacggaaggagttcttttcgccggtgacggtttcggctgtttcggcacgttggacggagggttcctggatacccgcatcaatctggacagatactgggatgagatggttcgctactattctaacatcgtaggcaagtacggctctccagtgcagaaggcgttggctaagctgggcggtctgcccgtttccactatctgctccacgcacggaccggtgtggacggaaaacatagccaaggttatcggcatctacgacaagttgagccgttacgctgctgacgaaggtgtggtcattgcttacggttccatgtacggcaacacggagcagatggcggaagccattgcggcggaactttctgcacaaggcatcaagaacatcgtgatgcacaatgtgagcaagagcaatccttcttatatcattgccgatatcttcaagtatcgcggacttatcatcggcagccccacctacagcaaccagatttatcctgagatagaatccttgctttccaagattctggtacgcgaagtgaagggacgttatctgggatacttcggatccttctgctgggcaggtgctgccgtgaagcgtatgggcgagtttgccgaaaagagcaagttcgagattgtgggcgacccggtagagatgaagcaggccatgaaggacattacttacgaacaatgcgaaaacctggcacgtgccatggcagagcgtttgaagaaggatagaagtaattaaagttgaattacccctaatttattaacctaataaaaacaatcacaatgagacttatcattcaatcggattatcagtccgtatcaaagtgggcggcacattatgtggctgccaaaatcaaggccgctcatccgacacctgaaaaaccgtttgtattgggatgccccaccggttcttctccgttgggcatgtacaaggaacttatcgacctgaacaagaaaggcatcgtgtctttccagaacgtagtgactttcaatatggacgagtatgtaggtttgcccaaggaacatcccgaaagctactattcctttatgtggaacaacttcttcagccatatagacatcaagccggagaacaccaatatcctgaacggcaacgctgccgacctggatgccgagtgtacacgctatgaagagaaaatcaagtcctacggcggcattgacctcttcatgggcggtatcggccccgacggacatattgctttcaacgagccaggttcttcccttgcgtcacgcacccgccagaagacattgactaccgataccatcattgccaactcccgtttctttgacaacgacgtgaacaaggttcccaagactgccctgaccgtcggtgtgggtactgtgctcagcgcccgcgaggtaatgattatcgtaaacggacacaacaaggcacgtgccctctatcatgcagtcgagggtcccgtgatgcagatgtggaccatcagcgccttgcagatgcacgaaaagggtatcatcgtttgtgacgatgcggctaccgaagaattgaaggtgggtacttaccgctacttcaaggatattgaggcggagcacctggatgcggaaagtttgctgaagtaagcagataattattgtataatatggattagcgcagcttgtttgattatgaaaaacaagttgcgctttctttttgtacttcggaacggcatgattatcttggaaaatgattacttttgctcgattttgtaacctgaatggatacttgaattttaaatatggaaagtgcggagtactctttggatgagctattatgtcagtctcttctgttgtttcgtcagtatcggttttatgatgctccggaatgtggagaaaaagcattccggatgttggaggaagcccatgtatggatggggcgtacgcaagagtgtgtggatatagcgaaatgggggtgcgtgatagagtgtcttgcgcagaaatactacatagaagatgatacggatgcgattctggaagaaattgatgctgccttggttgtgcatcggaagagatagagaaaatccatgcagaagtcaccgccgtttatttgtggctggggtactatttcctgctacgtttcagaaaccgggaatcccgttcccattcccgttgtaaacagataatgtccagcttgttgtgtgctttggtcgaaatcttccgtaaggtggagaaggggggagccccgacagaagtcttgtcacatctttcggtagatgtttggagagagatcgtctgctggatggagcaggtacatgattcccgtctttgcgagaagcagtcgtcagctttactggcacaattttataaaaggtccgggaaagcaggatgctttgctctagcagattctggagttttattgcttttaaggggaaattatctctgcttagttttatcatttctgcttccacacttccacccacttcctgcatccctttattcatcggcattacaagtgctgtggaagcaactcaaaaaggtggaagcaacttttgcttccacagcgaaaatacgccggaaagtaagttaatatcttgtttgttagtttattaatagaatgtacagcaatttgcaaatatcttgtttacacgatatgagtttcgtgtaaacaaggtattaacttcgtaaaagactgtttaccgatagactgtagctgggctcataataggaataagataggtgtacaatatggggaaaccatgagtgtaataggtgttcaacggctatgaggcaccttgttgacggtcgttagtcgagtggttgacggccgttggcagagcgtatcacggtcgataggcgctgataactccgtacagaaaatggaaaggaagcctatgtaaggggaaacaagctctgagctatttgttttgtttgtcacatttatcttgtttttgtacattattgaagcgtttttttgtatctttgaagggaggggccgtaaaaaagcttattctcatccaaagtttaattatatatacatgaattatgaagtgatgtatagtgctgttcataatattctgctgtacagttatttctaatgcgcagacaaatggcattgtgactgatggggaaaaaggattgccgttggctggtgtgaatatttatctccaaaaggattctgtgtatacgcaatgataatctggtaaagaacatgttcatatgaaaaaactgttatatcttgggcttttgtccgtttgcgtactgttaggttcttgcgtagagaagaacgtatccaatgcttttgataaggtagagaggtatatggatgtatatcctgacagtgcattgctgctgttggagcaaattcctcatccagagaagcttcgtggaaagcagcgggcagattatgcattgttgttgacacaagcacgtgataaaaactatctggatagtttgcagtcggattcgttgataaaaaatgcggtagattactatttagagggtgatgataaagtaaaaataggaaaggcttttctctattatggtaaggtactggatttgcaaaaaaatgaagcgatggctatgaaagcctatttggatgcctatgcagcgttggagaagaccaaagagtataagatgctggctttaattcagcagtatatgggttctttgaatagtgatcggaagatgtatgatatggcgcttaataattatcgaaggtctattttttatagtacgaaaacgagtgatactttgaaaatagtatatagttatcggaatatagcttggatttatgagattaagcaaaattgtgatagtgcaacttggtatgcaaagactggaatctcattattaaaaggggatagtttgtctccggtattttcttctctgctacattttatgggtgagcaggagaaaaagagaaaaaactattctgaggcaattacctatttttgttcggcggtcaaaaatgaacgaattccccatctcgcttattgttattgtatgtcgttgggagatacttatctgcaacttggtcaattagaaaaggcagaaaagtatttgaaaaaggttttagcttcaaaagacgactatacacaatctggcgcttataattatctctatttgttggaaaaaaagcgtactgattatgttagggcacttgcctataaggaaaaatctgattcattgttgagaattagtcgggagatagatttgcagaatagaattcttactttacagcggaaatatgaggctgacaaattaatgatggaaaataggttgcttgcgcaagaaaaacaaatccagcaatatgtatggatatgcatgtgcttgctattgataggcttgggcatagtattatattgggggataaagaagcaatataggaaaatatataagaaacgccttaaagtgcgtatggagagggagttgaaggtgtatagagagaatgaactggcaattaggcaatatattcatcaaatagaggaactgagacaaaaggaagcgctgtcggtggaaaatacaaaagaaaagattgggaaattaaatcagaaaatgcaaatattgatgaatgagaataaagaaatccgtgaaaattctgctgtaagtgctccatatattttgggccaattgaaacaaggcttgttacttgtggaaaatatgacccggcaagacaaattgaatgtttttgaatatgtggatttattgtccggcaattttgttactcgtctgcggaaagattataatttgaatgaaaataatctcttgttatctgttttgataaaattaggtttttctacaacagaactgcttcttgcttttgattgcgaagaaaactctatttataggaagaaacaaaggctaaaagaaaggcttcatttgggtaaacaagatgatttggaggcgttcttcagttcaaatcccatctatttgtccattataaaagatgaataatgatgcgcaatattctgatatatagtgttttattgtgtatgtagattgtccatatatttattgtctatatttcttctttttgcattatctttatggcataacaatgaaattcttatgctatgaaactaaagagatttttgtgtcttttaagcctatgcggtttgttgtcaataactgcaatagctactgattcggggcctgtggagcgagtggaaataaagctgtttgtcacagatgaaccttttacaatgccaaatggtcgggaaaaggagcctcgttctatacctatgctcgttcctttctctgcatttttgagtgaaagccattctatagagttggatttctatgaagctatcggtgaaatagaaattataatctctcaaaatggagatgttatctattcttcttccgagaatgttgtatcgcctatattgaaaaatatccaattaccgcaaggttcttctggtgtttttttgcttgaaataagaaatggtgaaggggcttatgcttttggtaactttgacttgtaaagatatggaaatatgagaacgtcgtcatataatataatagtaaaagtagatgatgatacagggcgttatgctttgttgaacagttatactcatgcttttgatattgtaaatcagaatgtatactagtatctcaagaatgaaggtagcgattgtgatatttcagatgaaacaaagaagaagcttgtgaagcgggggtatataacctctttgtcgaaagaagatgaaagggaattagtgaaacggcttttagataaaatttatgatgaagtccgtttgaagaatttcggttttcattttataatttcgtatgattgcaatctgagatgcgtgtattgttatgaagacccaatattgaatggatgcgcgtgtttacccaaatgcaggataaccaaggaacaagtagataaggcctatgaaataataatagaaaaggataaggataaaactggtagaaaaactatccatttgtatggtggagaacctttcttggttgaaaattatgaaatgcttgagtatattgtgcagaaaggtaaagaactgggatatgtgttttctgtaacatctaatggatatgacttggataaatatatggattatttagaagaaaattctaaaatattttcttttcaaataacaatagatggagtagaggatatacataatgagagaaaaccacattataggaataaggattcttttgctaaaatcacttcaaacgtagatagtttactcaaacttggaatttcggtttcaattcgtataaatacagacccttatacgatggaacgggctgatgaattattggattatttcaaagaaaaggggtggcttcaataccaaaattttaaagcttattatgctctcttgagaaaggaagttccaataaaaggagaaaatggagaatattcgaaagagatgtttacgcaaagtagtttcttctgcacttatctacaaaaaggattggaaaaacaaggatgtggtaaagttatgtgtcaggattatagcgtgaggtcggtgttgacaaatatgcttttggggaaatctactccttataaaagtcatttttgcggtgcgcaatctggtatgattatatttgatcctttgggtgacatttattcttgctgggatgttgtgggacaacgggaatatagagtgggacactatatgccagattttgtattggaggatacgtttgcggataaatggtttgattcgagagttagtaaattttcttgtattaaatgtaaatatgtgttgttttgcggtggaggatgtttggcaaacgccatacgaacaaccggaaatttacaatcaggtacatgcaatgattatcctcgtctgttcaatgccgaaataaagtatatttataatgaaaaaataaagaaaggtattgatgaaaactgaagatatagtgttgaagtatttacagtcggataaatgcagagaagaaaagtatcttcctaaagaatttttttctgtaactgttggttttttttaattgcttgaaagtttagaaaatgcagaaatggatattcgtttgggaattgtagaagctgaaataatttcattttgtacatggaatgccgataatgtttttttggagtctcatatatgcgaactgaaaaatttgctaaaatcggattttacatttgaaaaattgtgtcgctgtgaagttatatttaagtgtatgcggaatctttatcttgaaaagtatgcaaataatggtgtaatattgttggaggttaattaatgcagagaaaagtattgagtgaagtagtagattatttgcataaagcctatcctgatgcttctattggggttggtggttctgttgctataggaacttatagagctgatagtgatgttgatatcctatttcaacaagaggattgtcataaaaacttcttagtctctttttcccatagaggaattaaggtcagtatttttggatttagtagagatggtttgcgttggagcgagcagcgatttctgatgaaccatcacaatatgccagttgcttttattctaaatgtggtagttatatatgataataaaaagctaatagctgatttgaaaggttttattagagaggctatagagagacgtaaagcattaaagtatgtcctgattgatgagttgaaagctcgtattgaaactcagttgcaaatagagccaatttcatgttttgatgcaaaaagaaaaagttgtaacataattgtaagtattcggccaactacaggtattaaacctttatatacaacaatagcgactgtcactatgaacctaatagtatcagccgctattgttttgttgaacccatatgttacaatttatatcagttacaagattcctccttttgccttgtcagtacacattccggatgtttcaacttccatttatgtggaagtagattcaaaagttcttcttgggttgcctttttgtgataaggcatttgtgcgataacatcgttcaggtataccctgggatttaccccgtgcgccttacatgtggccagcagagaacatatgacagacatattaaccgcagcttcgtgattaccacagaaaagaaaattttttctgctcagagtgatgggccgttggacattttccgccagattgttgtcccagtacaggcggccatcgtccagacatctcataatattatcccatttggtataggcatatgttatggccttgcctgtcaaagaacttggactgtatttaattccttctgtctccatccataccttcattgcctccatgattggcctggacagttcctgacgcgtctgtctgcgctcatcatatgacaggccggcttcgtcacactggcgttctattttatagacatgctgtatctgagtcagtgcatgttgcgccatctccctgttttcatccaaagcctgctcaaaatgacggcgtatatgcaccaggcagttgagtagccgcacgtcggggttggtcttgaaggctgtttcataacctgcaaaaccgtcacattgaagatatcccttgaagttatattgatttgccagggattcgatgaccgctccggcccgtgatcccccgtcgtaatggaagatgaccagtttctccatgactgatcttaccatccagagatattccttgtcggctctgtgtttttctctgttaatgaccggaactgtagtttcatccgcctgtacatagtcacaggagaagacttcccatttgagttcttcatacagaggcttaagcagttccacggttttcttgaaccagccgtccagtgtactttcggtaaggcctttcattccaagatggcggtattgctgtatctgacggtagaacgggacatgatattcatacttctgaagcagtatctcggtaagcaggctggtgtcagcaatgcacttgtcgaccggcatcagcggcatgggagctatctctacgcctttctgtccggctggaggaagcagggtactatccttgagagcatatttgggacggatgatcaccttgacgtaaagcattcccggcttgtgtttgacgacttttgttatctcttcgcctattctacggtataaagacaagtctacgcctttcggttctattgtatcggtttccaatacgggcaagtcctctatcattttgcggttctgacgatttcgttttacgtcttccaccgattccttctcaatcttttccacagcctcgtcccgcttttcttccgcctgctgccggagtccggaaaactcgtcggcaaagaggtctggcatattaggatcatatacgcgaagtttctctgatttacgaccaaagagctgacggttcagccatgcgacctgagccgtcaactccttgatacgttcctgcagattttttatctgttcggattgattcttattagtagtagacaatgaggctatagaggcattcagcccttctatcgtcttgagtaaaatttctttttcttccattgtctatacttcttttaatgatgtaaatatactaattaacagtgaattatgcaacaatatccaaagtttactcacgcaaaaaacatgttatacatggtattccttacgttcggctcttaaccgccggagcctctgttccgggttttcctgtattccttcaaccatcatcaccagatcgcgccactccatgggatagctgtttgatttgggatcatactccggcagcttgaagcgaccggcctccagacgttttacatacattaccatacctccgtcttcggcatgaaggagtttcattagtctgcggctggaaccgatgaagatgaagacatcaccgttcctcacttcactgttcattttctcatgtaccactccgcatagcgaactgatacccttgcgcatatctgtcctgccaggacacaggaagtagcgcatcgtgtcgttcaggttaaacatgaccgtctcgaagactttgggtaaatatttccttcagcaaatcttcagaaccgctcccgaagtgggcacgaagtccattgggaaacagcagcgcaacaccatgcggcaattgttcttcttgggaagactccgtaaatgcctgtttaaaactgataggagccaactcgtgtttgatactgctcctgtcaacggaacattttctacgccagtagtgataggttgaataacttacacctatctgttgaaggtacgacttcaacggcagctcgctttgttgcacctgcaattctaattcttcaaattcttgtctgttcataataattgaggtttgattgtattcactgccgcaaagctacaaccaaacctcaaagtgtaaaaggtgcatttcttcgaatgcttacacataattaatatgataatttttatattctatttgaagtttcatgcagatagaattgtgcagaaattagaaggttgtaatccatatgacgtaataaaacaagatgattatatattatatgagaaactgaagggatgcttaccttatagttttaaatcatataggcaactaaaagaactttttgagaattatataaataatgtttattaaaaataggaagatttatgaaagagaagatggaaattatctctttgaatactactaaagtagaatttgaagaagaattgaatttagatgcaagattgcaaagattggagtctaatgagttgaaacttataagggctggtgaaacttgtgtaagaatggattgtccgacctacgtttgtccgtccatgtggggatgctcatcggattgtaatcgttgtgatggaaattgtgcacctgcttgtgaatgggatggttgcactccttataatgattttgtaggttgtttttatagccctgatgcatgctttgatatgggcatggatagttgttttagtatggatccgacatgatgtgtacaagttagagaaaacgtttatatgttgttgaatacgttggctatatgaaattatatatatttctttttcttttttccctttgctgtacttcttctttaaattctcaggttaggggatgtgttgttgacgggagagataaatccccgctatctggggtcaatatctatttgcaacgtgattcaactggaattgccataacggatgattcgggcaaatttaaacttggtgattggaatcaggggattctgaatgatactcttgtcttctcttacgttggctatatgcctatgaaatatactttgaaagaattagaggcttctggatacatagttaagctgtatagctattcccagtcgctgcaggaagtggtagtgaagggagaatctaggcgtactttcggtgagtatgaatttttgaataacttgccgcaagggctttattcttctgccgtacttgcgtgtgatggaaaaatttatgttgtttcgggagaggaatcttatgctatatgcggtaagggtataggagttacacgttatgataacttggtgaagaaaatgtttatatatgacattgctcgggatgcttggaaaaagtgcaggcattcttttaaggcccgtattggtcatgctgtgcattgttataaaaacaaattgttcatattgggaggcaagtatttttctactaatcgtagattggaatttacgtctcctcagcttgaagtatatgatatagagaaagatacggtgtatgtggacaagcgtattccacatcaggctgttaaccccattacgtttatttataatgattgcttgtatgtgatgggtggtacggttaaaaagaataaatattccgataaggtgcatatgctcgatttgaaaaccggtgtttggtacgacgcaggaataaaaattcccaaagaatggatggataatctgaagggcgttttggcgggacatacagtttatttgataggtggaaatagcacggattcgaagtggactataagaagttttaatttattgagtggcgaatggaaaacattatgtaacttgaaagaggtggtgtacgcaccggaagtggctcttaacggagttttgatttatatttatgatgcgaatgttttacagatttataatattgagaccaatgaagtgaatacatgctattttacgtatggtataaagaaaccgggattttgttatgccgatggtaaattgtatatcataggtgcttatcgggaggggcttccttcgatagaggttgtttctattgatgtagacagattgaatccgaaatagaatgagaacttttccatactataagcagttggataaaatggattgtggtcctgcgtgcttacgtatgattgcaaaatattatgggaaaaattattctctacagactcttcgtgaatattcttttctatcgcgggaaggtgtttcattgatgggacttagtgatgcggctgagtctataggacttcgtactgtcggtctacgcattacattggaacagttgaagaaagatgtgcctttaccttgcattttatattggaatcagaatcattttgtggtttgttatggcataaaaaagcagagaggcagatgcctttttcaaatagcagatccagccagtagtttgcttgtttactcggaagcggaaattaaacgatattggttatctgcagaatctgactcaagagaactcggaatagtattggctttagagccgggagcacgtttctttgaaaaagatgatgagcctgaagttgggcaaggacataagttgatgttctttataaaatacctgacttcctataaaaagcagttgttacaattagtattagggatgttgatagttgctttattacagcttatcttcccttttttgactcagactttggtggatgtaggtattcgggacggtaatttgaatttcataaccttgatactaatttcacaagtggttctttctacttctttactttcagtcgaatttattcgaagctggatattgcttcatgtaaatgcacgtatttctatatcgttaatatctgattttttgataaaactgatgaaacttccattacactttttcgatgtgaaatttgtgggagatatcatgcagcgaatcagggatcatggacggataagatctttcctaatgggttcatccatatccacggctttctcttttgtgactttttttatatttgcaggtgtattggcttactataatttgactatattggtaatcttccttattgggaactcattgtatgtagcttggatccttttttttatgaaatatcgtcgcgaattggattttaaacggtttgaacaagctgcggatgaggagagtaaccttgtacagatggtgaccgctatgcaggagattaagttgaacaactgcgagacacagaagcgctggcagtgggagcgtattcaggtgaaactgtttaaaatcagcgtaaaagggttggctttggggcaagtacaacaagtaggttctgtatttttcaatcagaccacgaatattataatctcctttatagcggcaaaagcagtggtagacggtcagatgacactgggtatgatgatgtctctgacttatatcatcggccagctcagtgcgccggtttcttcttttataggatttgcgcaacagtttcaggatgccaagataagtctggaacggctgaatgaggtacatgggaagccggacgaggagcaggatatcgcttctaaattgtctgttttgcctgagaagcgggagctaagaatggaaaatgtgtgcttcagttacgatggagcggatagagactatgtgctggataatgtctctttggtgattcccgaacataaagtgacagctattgtaggtgcgagcgggagtggaaagaccactctggtgaaactgatgctaggtttctattcgcccaataaaggaagcatgaaggtaggggatgcttcgttggagaacataaatcctcatttgtggcgtgccaagacgggagccgtgatgcaggacggctttattttttcggaaaccattgcgcagaatattgctgtgggagaggagcagatcgatgtggagcggctgcgccatgccgtggcggtggccaatatccgtgatttcatagactcgcttccattggggtataacaccaaaatcggtatggagggaaacggcatcagtcaggggcagaaacaacgtttgctgatagcgcgtgccgtatataaaaatccggaatttcttttcttcgacgaagctaccaatgccttggatgcgaataatgaaaaggagattatggaacatctgcatgaattctataaagggaaaaccgtagtggtagtggcgcataggctcagtacggtgaaggatgccgacaagattgtggtgctggataggggatgcattgcggaagaaggtacccatcgggaactgacggagcggaaaggaatgtattatcggctggttaagaatcagctggaattgggtagctaatgaatggaggaagagaagatatataaggatatagaacttcgcagtgaagaagtacaggaggtgatgaaccacatttctccttgggtggtgaggtgtgggattactgtcttggcagtgattctgttgatggtactggttggttgttggatattcaggtatccggacaccttggcggcagaggtgactctggctacggaagagccccccgcctttgtgctgtcacatgctacggggaagctggatacactttatgtgaagaatgggagtctggtgagtgcggatgcggatttaggagtgattggcaatgctgcgtcttctgaagatgtgcgttttcttaaggagaggatgaaagcctgggaagcgcaagattatgactggcgggaaggggtggagttttttgccggtaggcgctggcagttgggggaactgcaatcggtttttgcagctttcattacttcacttacagaatatgcacgttttatggagttggactattacgctcggaaacttcgttttcaggaaaaacaactgggtggacaacgctcctatcttcggttggcagagcgggagtatgagttgattgataaggatataaagcttgtcgaaagtatgtatacccgtgattctattctatatgtgcgtaaggctatgattgctgcggaatttgaggagtctggaagcagatatttgcaaagtttgcgttctaaagaagaggtacgtatgagtttgtttcaggcagaaatgcagttggtgcaacatgaggagaatatgttggatatacgtaagcaagcatacgatgaggaacagagtcgccggactgatttaaagaatgccatagagcagttagccgcgcaattgagtgaatgggagcactcttatttattgaaaagtccggtcagggggaaggttacttttatgacggtttggagtcgtaaccagaatgtgaaagccggtgaaacggttttcacgattcagccatccgacagttcaagggtgttaggtaaggctctacttcctttgcagggttcgggtaaggtacatgtgggacagcgggtgcatatacgtctgaataattatcctgaccaggagtttggctatgtaaaagggcaggttgcaagtatctctcctgctccaacggaagagggaatgtatatagtagaaataactttgcttgacggcatgcagaccaactacggcaagcagctgcctgtttcgcgtgagttgaaaggtacggcagacattatccttgctgacaagaatgtattggaaaggttgttggctccgttgaggaaaatggtgaaatatgaaaaatgaagtacttattccgtcatcttcccccttgtatccaaataccctcttttaaacatatccacgaacagaaagaatagtgacaagagcagtggcccgaagatgacacccatgaatccgaaaagggacaagccgattacaactccgaagacagtgataagcggatgaatgtctgccattttcttctggatgatgaagcgtatcaggttgtcgagctgtgaaatgactgcaccgccatagatggccagcccgatagcttgaacccagttgcctatcaatgccatgtagacagctatcggaaaccataccagcgctgttcctaccattgggatgatgctggcgaagcaggtcaggaaaccggcgaacaatatgttgggagcaccgaaaatccagtagcctatcatggctactcctccttgtatgacggcgagtaaggggatgccgatggcattggagcggacaatcatgttgatttcgtggatgacgttttgtgtattgtcatcgttgaacggcagtaggtcgttgacgtactgttccatctttttgccccctatcagcatgaagtagagtacaaagaccagtacgaagatgttgacggcaaaactgctgatacctcccatgatggcttgcccgatgcggggaagaattgaaatgacgtatgccaccgtgtctttccccaagatatagtagccggttttggctttaatgatgttggccgcttcttcgaaaggagctataatggcttgcgggtccagattgatgttttgaagattgaccacagccaaccataccaccagcccaagcggaaccagaaagcagagaatggcctctgctgtaatgagggtggcagctatgctgcgcttcattttccgcttgtcggaaagatacatcatctgctttctcaccaggatatagatagtcaaggctcccagcagaccgcccatgaatggggctatttgtctgaaaagaatgattcccagcccgataatgatagctatcaatgaatatttccagtattgttcttttgtgctcataaagttcctgtatttcttagtaaagaaacataaaagaagttgaaaaggtttggaaattgtggccggaattcaatatttatccttcgtccagccagcctaccccctggcgtatgatttccggctccccattggtgcaatccactacggtagagccttccgtaccgccgataccgccgtctattaccaaatcgacaatatcaccgaatttctcgtcaatcagttccgggtctgtgcagtattcaatgtcctcattgtcatcatgcggcaatgtagttgtcatgatgggagcatccagcaggcgggctatttcctgaatgatggaattgtccggcatacggatgccgacctccttacggttacggaatatcttgggcaggcgggtggtgccgttcagaatgaaggtgaaagctccgggcagattacgtttcatcaacttgaaggtgctgttgtccactttggcgtattcgctgaccttgctcaagtcgtagcagatgatggaaagattgttcttcttggggtcgatattcttgaggcggcagatgcgctcgatggcgcgctccttcagtccgtggcagccgatggcatacatggtgtcggtagggtagataaggataccaccgtcattcagtaggtcgaccacctgctgcaggtcggcgggattgttatttttttcataaagtttcagaagcatggcagaaatggatttgagttttatattacatgcaaaaatagataataatcggcttataaacaagcaattcacctttttagcatctctttctccagtttctttatcttcttccaggcctctttgaatttgggacagagggtgacggctttctcatagtttttcatggccgcctccttcatgtcatgcttcaggcattcgtcacccataaggatgtattcgcgggcatacttcacgagggctttctctttctccaatgctgcttgtttcagtgcacggttttcctctttcagacggttgatgatgttcagcttccggcggatgaggcgctgcacgttcggtttctcgatgtcgtagcgggaatggatggctttgaaaaactcatccaggaaagtgccgaagtcccctttgtcgaaggctttggcggcggcaacgtattgaacgtctgcctgtgcttgcttcaaggcacggtcgatggcggtgcggttgttgaagcgttcggagaagctgacaatctccggacgcacgaatacatcggcacggctgatgggctttttcagctggatgccttccagcgaggtgcagcggctgagggctacgtatgcctgcccaccggcaaacacgccgccggtaaagtcgatgactacccggctgaaggtcagcccttggctcttgtgtacggtgatggcccatgccaggcgcacgggatattgtgtaaagattcccagttcttcctcttcaatctgtttcttttcttcgttgtatttgtagcggatgtttcgccacgactctcgtttgacgtcacattccttgccgtcgtcggtgatgacgtagagggtctcttcaatagggtcgaagccgctgatgacgccgatggtgccgttcacccagcggcggtcgaagtcattcttgatgaagatgatttgtgcgcccggtttcagtaccagttcctgcgaggtggggaggctgctttcgggaaagtctcccatgatttcgccgtagaaggtgaccgggtcaccgggaagttccgccagtttcttgtcgttgatgtagtccacattgtcacggcgggtggcgagggtgatgtacatgtcggcttccgattgctctatttgggtgccatagcgggtgttgagcagctgaagttcggtagagccgacggtattgttgcggatgtggtccagcacatggatgaacttgctgtctgtttgacggtatactttctgcagttcgatggagacaaggtctatctggccgaataccctggcagagaagaaataaggggtagggtagaatcggttcagtatctcccgttcatctcctttgacgacgggttccaactggaacacatcgcccaccaatagtatctgtttgccgccgaagggttcgcgcaggttgcgggaatagacgcgcaggatgcggtctacggcgtcgatgatgtcggcgtgtaccatggaaatctcgtcgatgatgaccagttccagttcttctagtagtttgcggtggggtttggtgtatttgaaaaattcgtggatgcgtccccgttgaaggctgaagttcgggtcatcgggcagcagggggtagaaaggcagtttgaagaagctgtgcagggtactgcctccggcattgatggcggctatgccggtaggggcaagcactacatgctttttcttcgtattcgcgcagatatatttcaggaaggtcgatttgcccgtacctgctttgcccgtcaggaatacggactgacgggtatactgaatgaggttcaaggcatcttgaaactctttgttttgtgtatcgggaacgaagctcaaaagatttcagatttatgatggattcccgactatgccgaaatatttcagggcgttggcgatgccgtcttcatcaacagaagtggttgtgtagttactggcagcttttacgtcgttattggcattgcccatggctacaccgataccggcatggcgcaacatgctgatgtcatttcctccgtcgccgaaggccatggtctcttccagcttgatgccgaagtggcggataatctggtcgataccgttttgcttggtgtttcctttggctgtcacgtctacgaaggcaggatgccagcggcccatctcgcagtgagggacggagggcaggatgattgcttcttcctcggcgttgataaagggagtcagctggaagaaggctttgtcggcatggctgtcggtatagggctttgcttcgatggggtccactttcagttggcgatggaagatttcctccactacttcgccgggctggttcacgcagatgtcgtgctctcccaccaggatgcatgggatgttgcgttcgtggcagaaagctgtcaaggcatccacttccgctgtcggtatggggcttttgtagataacggtgtcttctacaaagcaataggcgccgttcatcgtgatgtagccgtctatcagattccgttcttgcaaggcggacaagttgttgatgatgacgcgtggacgtccggtagaaatgaagatatgtatgcctttggctttggcggcagtcaacgcttcaatagtggaaacgggaatttcgtgggtcttgaagctgaccaaggttccgtcgatgtcaaaaaacagagcttttatcataaggggttcttttatcttgtgcgcgaaattacttaaaaaagcgaagatatttcgtacttttgcgcacaaataaatgataaataacaaatgaagaaacattctttgaaagattggatgatagcggtgcgtccgtggtcattccccgcctcttcgatgccggtggtggtgacgttggcatatctgtattggatgcggcaggacataaactgggtgaacggtatctgggcattgttgaacatcattgtgtttcacgctgccgggaatacctggagtgattattttgactataagcataaggtcgatgcaagggatacctttggcgccaagactctgactgatgggatgtttaccccgcgcgagatataccgcttgtcgatggcattgctggcagtagctcttgttgcgggtatcggcttgttgtggcgtaccggcttgccgctgttgtatataggtataggcggtgcagcttgctcgttgctttatccaccgctcaagtatcgtgcgttgggcgatgtcgtcatctttttggcgtatgccttgctgccgacgttgggcacctgctatgtggctacgggagtagttgactggaatgtcttgtggatagctctgccggtgggactgattacggtggccattctgcatgccaataatacacgggatatgcgtaccgatgcccgtgcagagattcagacactggccatgaagctgggaggaaaggcgtcgatgtacgtttattgtgccgaagtcctttttccttttggctggatagccggcttgatagctgcgggaactcttcctttatggaccctgctggtgatgccggcactggttcctgccataggcaatgtacgggtggtgtcccgttttcccggaaagggagaaagtgccatagccggtctggatgagatgactgcaaaactccagttgttgttcagtctgctgttcacgttgtcgttcgttgtagccggtctgctgtcatgaagaagctgatttttaccattctgctggctgccgtgctgtggacggtcatgttttcgccttggacggctcctttcgtgaatttctggtggatgatgaccggttctgcgctcacactgtccgtgtttgccaccttgttcaatcccggctggtggcgggaggtgaagtggagcttgccgaatgtcttgctgggacttggcattgctgttgctttgtggggcgttttctggttgggagacaaggtgtcatcttggatgttcgattttgcccgtccgcaggtggactccatttatgggatgaaagagggagagtctccttggctgctggcagcattgctgctgttgctgatagggccggcggaagagattttctggcgcggctatgtgcaacgcacgctttccaaacgctggaatccgaatgcgggttttgtggtggctactttgatttatgcactggtgcatgccggttcctgcaacttcatgctggtcatggcggctctggtggtgggggcggcatggggggcgctttaccgtttctttccgaaccgctttgccgctattatcttgtctcatgcagtgtgggatgtggcggtatttatatttttcccgatatgattattatttacaaaaataaggtggcggtaatggattgtatactgagccctattcagtcgtatactgaacctatctcagtatacgactgaatagggctcagtatacgacagaaataggatgtatttatacatgttgataatcagatagttgtaaattctctctcgggcggtataaaaacaagacaaattgatgcgttgaattagtgaaactacaataaaaaaacaagcaaatgacttacaattttgatgaagtaatagagcgccgtggtaccgactccgtgaaatgggacggtgtgaagagtgtatggggacgcgatgatctcctccccatgtgggtggcggatatggatttccgcacgcccccgtttgtgatggaagccttgcggaagcgtcttgaacatgaagtgctgggctatacgtctgcgtgtgaggaatggtatacttccatttgtagctggctcagtcgtcgccacggttgggacgtcactcgcgagatgctgacttttgtacccggcattgtccgcggtcaagccttcgcattgcaatgcttcaccaatcccggcgaccgggtaatggtgatgactcccgtttatcatcccttcttcctggtgacgcaacgcatgaagcgcgaagtggtttactctccgctcgacctgaaagacggacagtatcagattgactttgagcgtttccgtaaggatatacaaggatgcaaagtattgattctctgcaatccccataacccgggcgggcgtgtatggacgatggacgaattacgccggattgctgatatttgtatggaaaaccatacgtttgtcatctccgatgaaattcatgccgacttgactctgccgccttacaaacaccatccttttgctactgtttcgggggctgctgcgcagaattccctcaccttcatggcacccagcaaaacattcaatatgccgggattgggaagttcgtacgccattatcctcaatgaggacatccgccaccgttttcaggagttcatggaagcgggcgagttcagcgaagggcatatgctggcctatatcggtgcggctgctgcctatatgcatggtgaggaatggttggaacagctgctggactatataaagggcaatatcgatttcacggagaactacctgcgcgagcatattccgggcatcggcatgatacatccgcaggcttcttacctgatttatctggactgccggggattgggactgactcaggagaaactggtgggactatttgtagacaaggcacatctggcactgaatgacggcaccatgttcggtgaaccgggcaagggatttatgcggctgaatgtcggctgtccgcgttcggtgctggagcaggcgctgaagcaactggaaactgcggttgcagacaaatgatagaaaaaactatatctcctatattatgaatagattacctttccttggactattgtttgcgttgctgtgccttgttgcctgccggcagatgaatgaggcacatctgttacatctggcagaaaagcaggtgaatatgaatgtggacagcgtgtatgccttgctggtacagatagagaggccatcgcaactttcggatgaggagaggctgttgtatggatggctgaatgcttatgtgcactataagcggcacaactcgatggcggaagattccttgatattgcctgcttccgattattacgtcttccgcaacgacacggcgaagaatctgttttcctatcagttgaaagcctggtactggtattggctgaaagagcacgaacggtgtatagctgccattgacagcggcgtagctttggccaaggcgctgcaggacacgggaagaatggctgatatgctgattgataaggcatactggtatgtgtatgtctggaaagattatgagaaagcgatagaaactttccgtaccgccatagctttggacgcaagagccggaagcttcttctctatgggaattgccatggggctgaacaagaatgattctgcatcctattacatggagcgcagcatagaactggcagtggaggcaggagataccagtaagatagtgcattatttgcgtaactatgcccagatgcaggcttactcttttgatgaaccttccggtgcaatagctactattcgtcgtatggagcagtatgtcgtcgacccggtgcagctgcgtatgggagatctggtgaaagtggaagtgttcttgaaagaagggttgcttgattcggcggaatactatttgaataaggagaggaaacgtggcgagggtcggaaccggtttctgacggaagagaatatggtggcggtatatagggcactgatagattatacacgtcaccgtacgtttgatgtgctggacgtggcgcgctataatgattctgttgccaatgctcttgctgcgctgcagagtaccgtccggcgtaaggacgagtcgaaggagacgctttcgcaagccaacttgattctgacggtggaacggaagcaggcacagttgaatttgttgctggcactgttggtactggtgcttgcaggtggcggtgtgtccctttatatccgtaaccggcgtaataggctgattgaagcggaagaacgggcggaaacactgacccggttgctggaagatgtgaccaggaaccagtcgaaaggggaagacgggcagttttttcggaaaatactgttgcagcaattaggcatgatacggctggtggctaaacaacctacctcacagaatcaggagctgcttcgccgcatttcgggtattaccagccatgaactgccggtagagagtttgctggtatgggaggacttgtatcctatcatagaccggatttatgataacttctacacaaagatggacagctgttttggcgatgtgctcattgacaaagaaaagcagctttgctgcctgctctgtgcggacttctcgacgaaggagattagtgtggtgacacaacaaagtattcccaccatttaccagcgaaagacgaatatccgcaagaagctggggatgggggagaaggaaggcatcgtagagtttataggcagcatatagaccggaaaaggcataatatagacttttgtaaaattaaagtgttgatatgtagtgatttgtagttttgggatatagactttttattccccgatatagaccgtttgaggcatgttttacctctatctttgtttcagcgaaatacaaagagtaaaacattgaaatcaaacgcataatgaaagaaaatctactgaacaacgttagaaaaaaagtgatggtatggatggccttggcaagtatggccactttcctttccgcccagacttaccggctttccggttgtgtgcaggacgagaaccgccaaccggtagaggtggcgaatgtgctgctgaagcaggcaaaagacagtgcctatattaccggtatgctgaccgacacgcaaggttgtttttcctttgaccagccactgggagaatacttgttgcacattacccttatcggcagcgaagacctctacgttcccgttgtgctgcgaggaaacaaaaacgttggcgaattgacattgaaatcttcttccgccttgctggacgaagtgaccgttacggccgcgcgtcctgttatcaagcgtctggtagatagggtagtgttcgatgcacataataccatagcctctgccggtggcagtgcactcgaccttctgcgtgaagtgcccggtctgcaggttggacaaaacagcattggtattataggtaaagggggcatcagggtttatatcaacgaccgtgagacgaagctgtcgggagatgaactgatagattacctccgttcctatgacgcctcccagatactgaaggtggaggtgattaccacgcctccgtccaagtacgatgccgctggaaatgcaggcatcatcaatattcgcttgaagtcacgtcccaaagattacgtgggtggtacggcttccgcttcctacagcgctggtgaaaaggacaattacggatatggcggggtaagcctgaacctcagcaatgggcgcgtgtcatcctttctcaacgggggtactacgcagggcaactatgagacgcgtgagaagaattaccgctattttccgcagaacacctggaacagccgtgccgactacaccaattacatgaatagcttctaccttcagggaggtgtggatgtatcgttggaacgggactggagtgcaggtatgcaggccatctataatcacagtgctcccaaaccgggcaacgccctttcatggacggaagtttacgatgcctctaccgccgtactggattctctgctgtactccaacagtgacaaggataccggttccgaccgcctcaatctgaattttcataccgataaggtctgggatgacaaaggcaagaaaatgacttgggatgtggattacctgcgtgacaaccgggacgaaaatatgggctttctctcgaaaaccctcctgcctgacggtacggagattccgggtacaaacttcgactacaactatctgcaacatcgcaaggtggatgtagtctcctccgctcttgatttcatccttccttttgaaaagtacaagataacggcaggtgccaaggtctcctttaccaacactcgcaacggtatcaattacgatacgtcggaccctacgctggtgcaggatgattatttccgttacaaggagcaaatctatgccttatatgctgattatagccgtgaatattccgaacgtttttccatgcagttgggcttgcgtatggagcacacccgcactaccggtatttccgaagcgaaggatacggaggacaagcacgactatacgcgcttgttccctactgtctatctgctttattcgcctacagacgggcatgcgctgaacttcagtttctccaaccgcatctcccgtccgtcgcagaatatggtcaatccttttccgttctatcagaacaaatatacgtatgcctgcggacgtgaggacttgaaacccagctacacttacaatgcagaactgggatatacgttgaagaacaacttcaatgtttccgcttattattcttattcggacgatgtattcttccaggttgtggacttggatgccgaaacgaatgtgacttctttcctttgggagaatttcatgaagacgcatgctttcgggcttaacaattcgtacactttccgtaccaaatggctgcaagcttacgcccagcatggagtgagctatcgccggactacctccagcgctgtcaccacctctcccgaggagaaaggatgggcttatgacgccagtctgcgcaacactttcttcttcaatgaaaagaagactcttctggccacgttgtccggttcctattcttcccgtcagtatcagggcatctatctgatgagtcccacttacagcgtcagtgcaggtatgctttaccggttgttggacaataagctcaacctcagcctgaatgtcaacaatctgtttgtcagccattccaaattggaaaccatgtccaacgggctgaagataattgcagataaccagttctcctttaccagtttccgtatcggtgtatcctatactttcggtggagatatacgtagcaaggggcagcggaacagtaacgaggatattcagagaagattataataagaagtttattgcgtgttggcaattgggagaaaatatttatctttgtgatacaagcgattgtaacaacgattaatataaaaccatgatgaaacagaaacttctttacctattgccactcttcctattgtcgggatgcgggcaggctacttacaagaatgcatctctgccggcagaagagcgtgccggacttttgctgaaggaactgacgctcgaagagaaggtgtccttgatgatggacagctccaaaccggtggaacgtctgggcatcaaaccctataactggtggaatgaagcgttgcatggagtggcgcgtgccgggctggccacagtgtttccccaaccgattggtatggcggcatctttctcgccggagactgtatacgaggtatttactgccgtatccgatgaagcccgtgccaagaatgcctactatgcatctcagggaagtcgtgaacgctatcaaggattgacgatgtggacgcctacggtgaacatctaccgcgacccccgttggggaaggggtatagagacttatggggaagacccttatctgaccagccgtatgggagtgatggttgtaaaggggttgcagggtacgaacgatggaaaatatgacaagctgcatgcttgtgccaagcactttgccgtacactcaggtccggaatggaaccgccatgagtttaatgcggaaaatatcaagccccgtgatttgtatgaaacttatcttcctcctttcgaagctttggtgaaagaaggaaaagtgaaggaggtgatgtgtgcctacaaccgttttgagggcgatccttgctgcggtagcgaccgcctgctgatgcagattttgcgcgatgagtggggatttgatggtattgtcctttcggactgtggagctattgccgatttttacagagactatggtcataagacgcatcctgatgcagagtccgcttcggcggctgcggtgctgagtgggactgacttggaatgcggttcgagttacgaggccctggtagaagcggtgaagcagggaaagattgatgaaaaagcagtggatgtagcagtcaagcgtcttttgacggctcgctttgccttgggtgaaatggacgagccggagaaggtgtcctggactggcattcctttttctgtggtggcttctgccggacacgattctctggcgctcgacatggcgcgcaagtcaatgacactgcttatgaacaaggataataccttgccgttgaagcgtggagggctgactatagccgtgatgggtccgaatgccaatgattctgtgatgcagtggggaaattataacggtatgcctccgcacacagttaccattctggacggaattagaaaagctttggggagtgatgatcggcttatttatgaacaaggctgcggatgggtggagagagctcagatacagagcgtcttcaaccgttgcaagactgccgacgggaaacccggatttactgcacgctactggaataacgtgactcgtgacggtgagccagtcactactgcccaagtgaccactcctttccatttctgtacatccggtgccacggtttttgctccgggtgtgaaccttaccgacttctcggctacctacaacagcgtattcactcccgaccagtcgggagaggtggtctttgacatctatgcttatggctcagggagattgcggataaatggggaggaagtgagaggattctccaatcagcacggtgggcagaagagtgcttatactttgcaggtacaagcaggaaaaacgtatgacgttgaattggattttgaatatttccgtagcgatgcacagctgaactttgaccttggatttaagaatgaagtggatgtgaggaaatctgtggagcgtgtaaaggatgctgatgtcgtggtctttgtgggaggagtctctccgaacctcgaaggcgaggagatgggtgttgagcttcccggattcagaggaggcgaccgtactgatattgagttgcctgctgtccagcgggaactgattgccgctttgcaccatgccggtaaaaaggtggtgttggtgaactgttcaggttctcctatcggcttggagccggaaaccgggaggtgtggagctatcctgcaggcatggtatcccggtcaggcaggcggtacggctgtagctgaagtcttgttcggtgattacaatccggcaggacgcttgccggtaaccttctaccgtaatgtgtcacagcttcctgattttgaggattataatatgaccggccggacttaccgttacatgacccaggaaccgcttttccccttcggtcatggattgagctatacctctttctgctatggcgctgtggtgcttggttcggataatataaagtccggtgagaaattgagattgaatgtccccgtaaccaataccggcaaatgtgacggtgaagaggttgtgcaggtctatttgaagaaaaacgatgatgtcgaaggaccgagcaaggcattgcgtgctttcaaacgggtacatatcccggcaggaaagacggtcgatgtagagtttgatttgggcgataaagagttggtgtggtggaatccgcaaagcaataccatgtgcgtttccgaaggcagttatgaacttatggtgggcggtagctcgcagactgctggtttgctgcgccggtcttttgtcattcagccttgatacattgctgacaaagtcgaaaaagaaaattccgcttgaaggtaagtcatgaccctcaagcggaatttttgtgtactggggatacatgttcttaataatccttaatacaatatgttaacttccttgcttctctgttcttatctaattttaattgatatatttgtgatatcattatgatatcaattaaatctatagaatatggaaacaaaagagtgtggtttcagtggtttcaagatgaatggctttttggccttgttccttcatttggtagtgcttacggcagtgataatctttgggtttatcatttctgtgcctaccttgatcctttcggtgtgtctgtgtctgatatggtttattatgtttgccggctatatggagctggagccgaacgaggcgcgtgctatggtgttctttggtaaatataaagggacgttcaaggagaccggctttttctgggtaaacccttttcttaataagaagaagctttcgcttcgtgcacgcaatctggatgtggagccgataaaggtgaatgataagattggcaatcccatacttataggattggtattggtgtggaagttgaaagatacttataaagccatgtttgagattgactcgcagacgatggctgcatccactcccacagcaggcaatgccaaccaggtgagccttggtaatgcggtggccaaccgtatgaatgcgttcgagaactttgtgaagatacagagtgatgccgcccttcgtcaagttgccggtcagtatgcctatgatgataatgaggctgatacggaggaactgacgcttcgctccggtggcgaggaaatcaatgagcagttggaacagaagttgaacgagcgtctggccatggcgggtatggaagtggtggaagcccgcatcaactatctggcgtatgcacccgaaattgctgctgtgatgctgcgtcgccagcaagcatccgccatcattacggcacgcgagaagattgtggaaggggcagtctctatggtaaaaatggcgctccataaactttctgaagaagaaattgttgaactggacgaagacaagaaagcagcaatggtcagcaatctgttggtagtgctttgtgcggacgaggctgcacaaccggtagtcaatacgggaacgttgaaccattgataaaggatacggatgaaagagatgggggttataggacgatgggctcttatactgctcttgctgggcaatgtatatgggggctttgcacaagatgcgaatactgcgcgcgcgcagcacatttatgaattgtttgtggcagggcaagatgacagtatccatgcggcattgaaccgggagttgcaggagaaactggctccggcactcttcaatgattctttccggcaagcagagaaaatgtttggtaaatccatatcaaaaggagaatggaagaccgattctgcccagggaattactatctattattccgatgtggaatttgaacgttataatctccgctttctagtggcttttgatgctgacggggcactgaatacaatccggctggtccctgcacctgctgttagcactgcccaaccggtagcctatgataagacaaaaatggatgaaagggatattacgctgggagccgacggctacaagcttcccggaacgttgactttgcccaagcgggcagtcggtccggatgcatgcagggttccttgtgttattttggtacatggttccggtcctcacgaccgtgacgagacgataggtcccaacaagcctttccgtgacctggcctggggattggcggaacgcggcattgccgtcgtccgttatgaaaaacggacaaaagcatatggtgtggcttgcgttcctgccggtcgcgaactcgattatgatactgaggccgtggacgatgccgttgccatagtggagcaggtaagggctttgcccgagctggctcctgacagtgtgtatgtgttggggcacagcctgggaggtacattggctccccgtattgccgggcgttcgaaaggtttggcaggtatcattatccttgccgggctggcaagaccgcttgaagatgctcttgaggaacagttttattatacctcttctttgacggattcttcagtcaatgtaaaggctcaacttgatgaattgaaacaacagttggctaatgtcaaaaagcttggtacggaagagtttgatgaaacgatttccttgccattggggcagccccgctcatattggctgtttgccaatgcttacaaaccggtggaagttgccgctaaactaaagctgcctatatttgttcttcaaggggagagagattatcaggtgactatggaagacttcggtttatggcgttccggtttgttgcgctgcaagaatgcatatttcaaatcttatccgaaattgaatcacttgttgcaggaaggcagcggcaaggcgactccgtttgagtatagccatgcttcgcccgtcccagcatatgttatggatgacattgcctccttcgtgcggggcaagcagaatactctttgattggtacttggttatatcaaagtaacttcaatcgtaaatcgtaaattgttaaatagtaaataaatagtggctaaaaaagaaacttcaaccaaaagctttgtcctccgtgtggatgctgcaacgatggatgccattgaaaaatgggcagccgacgagttccgtagtaccaatggacagcttcagtggattatcgctgaagcattgcggaagagtgggcggatgaagaagtccaagaatcctcctccgtctgaagagaaagcagaggaggattcgtaataacagattctaaatcgcagatagtatgattaatcttggtccttattccggcaagaattgccctaatgtccgttttcaacccactgtgattgaccgtattctggaaggtacggccctgcttatcgtgctcgttacgtggattagcatttactggctgtatacccaaagagaaggtgccctgctgcccgccgtctgggtgatgggtggctgttccattttctgtttccttttgatggggggattggcgtatcttcccgtccgtttcatcaatttccctattcgggtcaccgagcgcaatgcggctgttcaatatttgtttgccatacgccttacccgggtgatgaacatcattctgttgttagtgcttttgggcagtgtttggggcttgtattatgcattcggcaaactcctgctccttgtctcgtttgttttgttgggggtggcatttatagggtactatatactggcgtttaaatataagtagccttacagtctgtttaatagtcctttttaccacttaccctcctttctcatctttatttgttgttataaatctgccattacctactaatggttactctttctcttctttttgtaatttttaggtattgttctcctttttaactacctctacctttgccccaataaaatttaagataaaagatgagaaaattaacaggcttattcgttttatgttttctgctttctgccaatgctttgcaggctgctgaacctgaaaaagttacttctgcagcagagagtacggaaatttcaacagacaaagagaaaaaggaaaaagtagcgaatgatggcgacaactacaagaaattccgtttcggtggatacggagaaatggttgcaagttttaaggattatggtattaaccgtttctatggtgcgcctgaaggcaatccagacaaacataggaatacaatttctataccccgtttcgtgttggctctggattacaagttcaattccaaatggatactcggtgctgaaatcgagtttgaatccggtggtacgggtactgcttatgaacttgagaatacggaaaacggtgagtatgaaacggaggtggaaaagggtggcgaagtggctatcgagcaattccacattacccgtttaattgttccacaattcaacatacgtgccggtcacatcattgtcccggtaggattgaccaacgcccatcatgaaccaatcaatttctttggaacttatcggccggaaggagagacaaccatccttccttctacgtggcatgaaaacggactcgagttttttggttcttttggaaaaggatatgccagctttgattatcaagccatgatagtggccggtctgaatgccaatggttttgaccgtaacacctggatagcaagtggcaaacaaggcatctttgaagaagacaactttacttcaccgggctatgtggctcgtctggactacaagggggttccggggttgcgtataggcgcttcgttttattactgcgctgatgccggttccaattctgacaaagcggatacttattcgtctaccggtaagattccggtaagaatctatacggcagatgcccaataccgtaataaatatgtggttgcccgtgccaatatggtatacggaaatttgggtaattcagcgaagcttagtgaggcaaataccaaattgtcgaataaatctccttacagccgtataacccccattgcaaagaatgtagtcagttatgcagccgaggccggtttgaatatcagcgctttcttcaaaggaaacaggaaagttccggttatctacccctttgcacgttatgaatattataatccgcaagaaaagggagaggccagccagataatggagaaacgttgtcaagtaagcatgtggactgctggattgaattggtatgccttgcctaatctggtggtaaaggctgattacaccacccgccaaatcggaacaaacaaggtttttggaactggtaagtataatagtgaaaatgagttttcgatcggtattgcctatatcggttggtttgtcaagaagtagatgaatagtaatcaattaattttatacaaatgaagaaaaatttcttttatgcgacagctttggtattagggctggcatttacggctactgcttgtagcgatgatgatgacaacagtacagttaatcctgctgacattgagtataattcggggaatgcagcaagttggcacaactacatgagaaatgtggcggctttgttgaagacagatgccaccaatctttatgattcttggaatacgagttataagggtggggcaagttttgcaacttccttcaaagctcataatggtgcctataacttttcaagtgcctggaactgtatagagcaggttatcgacggttgtgttgaaatctccaatgaggtaggtgagacgaagattggtgatccatataataaatatatggcaaacaatgttacagaggccctctatgctgttgagtcatggtatagctggcattcccgtgatgattataccaataatatttactcaatccgcaatgcctattacggctctttggacggtaaggtgagcgacaagtcaatttcaaaattggtggctggagccaatgcggagttggatacgaaagtgtcggcagctatcactacggcagcatcggctattcaggctattccccaacctttccgtaataatatcaacagtcaggaaacggtagcggctatcaaggcttgtgaagaactggaaagtgtattggataaggagttgaaaccttatatcagggacaatagcaccattaacagcaatgaagcacttgacccgattgttgaaaattatgtcaatgttgtggttttgcctacctataaggatttgaaggagaagaatagtacgctgtatgacgctgtggtggctcttgccaacaatccctctaacagtgcttttgagacggcatgcaatgcttggataacagcccgtgaaccttgggaggaaagtgaggcgttcctatttgggccggtggatgagctggggcttgacccgaatatggatagttggcctttggaccagaacgccattgtccagattctgaattcccagaaatggggcgatttggaatggagcgagggtgatgatgatgcaaaagttgaatctgcccaaaatgtacgcggattccatactttagaattcctgcttttcaaggatggcaagcctcgtacagttaaataagaattatttataaacaatactcaagaagtaaagggggggatttggagaatcctgcctttacttctttggcatgtttggatatgccattattaaaaagtagataaagatgatgaatcatttaatgagatattcatgtcttctcctttgtttgtcggcaggtttgactgcttgtgatgatgatgggattgacgtgttggatatagagattcctgaaggatacgctctgtctgccggaacgtccacaatcttcatgaattcatccaaggcctatgattcaccggcagattgggtgtcgggtgtttacaacagtcgctttaatgatggtgacgggctttacgatgatgtgcgtacgagtagcaatggcatgggaggggggcttggcccagtctatgcggggtattcttgtggcagttgtcatcgtaatgccggccgtaccaaaccgacgctgtggagtgaaggcggatcgggtagttacgggttttcctcgatgctggtttatataagccgcaagaatggtgcgttttttcaggattatggccgtgttctccatgaccaggccatttatggagtgaaaccggagggaaagctttctgtggagtatacttatgagacttttacctttcccgacggagagaagtatgaactttgcagaccggcttattccatatccgaatggtatgctgacagtataaagcctgaagatatgttctgtacggtgcgtatcccgttgagacatgtcggtatggggcaaatgatggctttggaacctacggagattgaagcgcttgctgcaaaaagtaattatccggagtatggtataagtggccgttgcaattacattaccgaacgtggtgtgagaagcttggggctgtcgggaaataaggctcaacatgcggatttgactgttgaacttggtttttcaagtgatatgggtgttaccaatagccgctatccggaagagatatgcgaggggcaggcccaggtgaatcaaggcagcatgatggggctttcttatgcccagttggatgtttctacagaagatatggaagatgttgacttgtatatgcagagtcttggtgttcctgcacggcgtaatgtgaatgacccgcaggtgataaggggagaacagaatttctataaagccaagtgccatctttgccatgtcaccacgttgcataccaagcctcggggctccgtgctgttgaacggtacccgtttgccatggttgggaagtcagacaattcacccctattcggattttttgctgcatgatatgggctccgaaattatgggagtcggtctgaatgataactatgtaagtgggttggcgcgtggcaatgaatggcgcactactccgctttggggtatcgggcttcaggaaaaggtaaacggacatacctacttcttgcacgatggccgtgcccgcaatcttgttgaagccataatgtggcatgggggagagggagaagcatcgaaaaatctctttaagaacatgagcaaggatgaccgtgatgccctgattgcatttttaaattcactttagaactaataagctttatataaaaagtaattatgaagaaatttttatatgtcgccatgctggctgttttgcctttgaccgctatggcgcaacatgaggaagatacggagaatggtgtagtgtcattggccggaagagaaggttttaccattgaaacaaagaaaggtgactttgttttcaagccttatctgttggtacaaacgagtgctaatttcaattggtatgatgatgaaggcttggataaggcttataaccaagataatattgccaattcgggtttttccattccttatgccgtacttggctttactggcaaggcttttggaaaagtggctttcaatctgtccatcaatgctgctgcaagtggaggagcgctgttacagcaggcgtggttcgatgtacagctgaaaaaacaatttgcgattcgtgtcggaaagttcaagactccattctcgcatgcctatctgacaactcttggcgaaacactgcttccccagttgccggtttctctgacgtcttctgtaattttgccttattcgttgaatgccgtgacgcctaatatcggtacgggatttgacctgggtgttgaagttcacggtctggtggcagataagttcggttatgaagtcggcttgttcaatggaaccggagcttccgtgaatacagcttcaaagacgatgagtgatgactggcatatcccttcattgctgtatgccggacgtctgacttatatgcccaagggggtgatgccttccacacaaggtaatcctaaccgtttgaacgaggataagatattattcggtctttcgggttctatcaatgtggagagtgaaaatgagagtaccaatgatacccgtgtggggttggaatttgctatgttgaagaacaagctctatctggcggctgaagcttattatatgaatgtaggtttcaccaaacggcaaaagataaatgaatcgtatagctttttaggcggttatgtgcaaggtggttactttgtcgctccccgcctacagcttgccgcacgctacgatatcttcaatcgtaacggtacggatgacgacggtttcctgaatatgcctgctgtaggtatgaactactttttcagaggatgcaacttgaaattgcaggcaatgtatcagtatgtagcccgttggggacacgacacgcagctcgaccgtgataatgataatttaggtctggccactcactctgccacggtgatgcttcaatatacattctaaatgaagtcaggaaaggattcgtctatgaaaaaatacattcttttcttttttctgcccgtgcttcttataggtctgcatgcatgcgatgaggggagaatttatgagaatgccgttgtggccacgggtgaaggacgcacagtgaagatgacaggccggattagtggtgtggataagtggtcgggcgactatagtgtggtagtggcaggatttgatgatgaaagcgattatgccattgtttcaaaggttgttccggcatccgaatcggataatgatgaaatccagttgacaatgtccggcataacggatgaggtgacaactgtcgagctatgtgtaatcaataagttgaggaagcgcattgtcagtttggtggcaatggaatgtactgaaatcgctgatactatacttatggatgcaggaacagttgatgcaagtatgtacaatgccattcaacaaaaaatattcaatgccacttgtacggcttgccatggtcttagcaccactccgggtggtggcttgaatctgctggaaggacatagccatgctgatctggtcaaccgggcttcaacgacggtggacggtaaaatgagggttatgcccggtaatgcgtcagaaagtgtcttgcatctcatattgggtacggacatcagctcggattggcgtatagaccattctcagatgataacctcatctgatatgcagtctttgattggcaactggattgacgatggtgcacagccgtaataatgatgggccttactggtaataccggtacttttttgaacaacaacgactaattgatatttaatatgaaaaataaacaacaacaaactaatcaattggagaataccttaaccgaaatctttaaatatgaggtagaagcgggtgtttcggaatatcatgtaatgattcatgccaccagaccggaagcgacttatgaagaacagctgaatgcggtggtcgacacttactgccaactgcgtgaaagtgaactacaaggtgctgttgccatctttaaacgctactttctaagtgacgccgccaatcaagcagatatgctactggcgctttcggcagaatgttcggattgtgcactctccgtggtagagcagccgccgttgaacggtacaaagattgcactgtgggtctatctgcagaaaggtgtggaaacacaggtgcttcataacggattgttcgaagtgagacatggcgcctaccgtcacctttggggaggcggctctttcaatcgtgctgccaattcggaataccagacccgtctgctgttgaatgactatgtgatgcagctgatggaacagggctgtaagctggctgataattgcatacgtacctggttctttgtacagaacgtggatgtgaattatgccggagtggtgaaggcgcgtaatgaggtgtttgttacccaggacttgacggagaagactcattatatttccagtaccggtatcggtggccgtcatgccgacccaaaagtgacggttcagatggatacttatgctgtagatggtttgaaatctgaacaaattcactacctttacgcaccgacacatctgaatcccacatacgaatacggtgtgagtttcgagcgaggtacgtatgtggattatggcgaccgtcgccaggtgtttatttcgggtactgcgagcatcaataataaaggtgaggtggtatgtcccggagacattcgcaagcagacggaacgtatgtgggagaatgtggaggctttgttgaaagaggctggctgtacgtttgatgatttaggacagatgattgtttatctgcgggatgttgcagactataccgtggtcaaaggaatgtatgacgagcgttttccggatactccgagagtgtttgtatatgctcccgtatgtcgtccgggttggctgatagagatggaatgtatgggagtcaagtctttagaaaacaaggagtttgctccatattgatttttttacttttaattgatagctcttaattgaaaaagtttctcatagctgtttatggttgtttgctgctcttacttgctgcaactacgtttgtagagcagacatacagtacggattttgtagaaaagcatgtttatcatacgatttggttctgttgtttgtggggagcccttgctgcgatgactgttgttgtgcttgtaagacagcggttgtggcggcgtctcccgacgttgttgttgcatggctccttcctcgtgattttggcgggagccatgactacgtttctttgtggccgaaaaggatatgtgcatcttactgtcggcagtgaggtgaactgctttttggaacaagacggcaggcaggttgtagagttaccgttcaccttacgtctggacagtttccggattgagtactatccgggtacggatgctcctgcagattatatcagctatattcacggtgagacgcccgtctccatgaaccgtattctttcacggcaggggttccgcttttatcagtcttcctttgatgaggatatgcaggggagctggctgacagtgaattatgacccgtgggggataggggttacctatagtggatacctcttgttaggtgtctccatgctctggatgctggtcagccggggtggagagttccgcaggctgctgaggcatccgttgttgaagaagggaggaatgtttgttctattgttgctgtgtctgggaagtggggtacatgcgcagaagagaagccttccggcactggcacgcaagcaggcggatagtctcgcccgtaagcaggtgatttataatgaccgtgtggttcctttcaatacccttgcgcgcgattttgtactgaaactgacgggaaaaccgtcttatggaggcatgacgccggagcaggtgattggtggatggcttctgcgtccggaagtttggcagaatgagccgatgatttatatcaaaaacgaggcactccgtcgcctgcttcatttggagacaccctatgcatgtctggctgatttgttcgacggtgagaagtatcgcttgcagaagttctggaaggggaagcaagaccatcatcagaaaatgacttctctggaaaaggccattgtagaggcggatgaaaaggtgggactgattttgatgctccaaaatggtacattgattcatcctttgccggaagacgggagtgtggagcctgtttccgatactaaaatacaagccgaattgctgtataaccgtattcctttcagcaaattactgttcatgttcaaccttacggtggggatgctggctttcttccgtctgctgtatcgcggcctgcgtcgttcgtcggcattgtcagactcttccggtaggattgtagcgctctctttctcttcgcgtttggcagatacttttttcccgttttctctttatgcggcgtttctctttcagctcttcgggtatggcctgaggtggtacatcggtgggcgaataccgttgggcaacggatacgaaacgatgcagttcatggcattgtgtgcgctgttcctggcttgtctgtttcggcggcgcttcccgtttatggtgcctttcggctttttgctgtccggttttgccttgctagtgtcttatttgggacagatgaatccccaaatcactcccttgatgcccgtgcttgtttctccatggctcagtacgcatgtgtcgttgataatgatgtcttatgctttgtttgcctttatgatgctgaacggcatactggcattgtgtcttcgccgttcagcccggatgttgatgctgctcggccgattgctgctttatcctgccgttttctttttgggagccggtatttttctgggtgcggtttgggccaatgcttcttgggggcgatattgggcttgggacccgaaggaagtatgggcgctgattacctttatggtttatggagcggcgttccatgcgcgcagcctgcgcattttccgcaggccgttattcttccacatctatatgattgtcgcttttctgacagtcctgatgacctattttggggtgaactacatccttggaggaatgcatagctatgccaatgcttgatttgcgggtggttctacctatttataatgactggcttttttcattatacctaatttgagcgattgcgtactgtctgccgatgccttatctttgcaacatcagatttgaatgaattagttagtcataattacgtaaccacttttatgaagataaaaggatccccactttccgatgtgatatcgtgaagtggggatttgtgtatggcgtggcggatactgtgggcaaggttggttaaggctacttgtcagactgcttgagtcatagcatggggagggctgacataggggatgagctttgtcttcagcctgaagatgcacatctctatgctgaagatatacatcgttacgctaaagatgtatatcgccagtcacaagataaaccttaatcaatagccagaggccttttcccgtatgggggagaatacttttgcaagggattcatccgttttttccctataggccgtagtgggtagggaaacagttgccggaagaaccttatagagagtccttgatgtctcccaattccactagcttgttcacaatagcgtagatggtaagccctgccggagaatgtatctgcagtttgcgtgcaatgttacggcgatgggtaatgacagtatgaatggagaggtagagtttgtcggcgatggctttgttggtcatgcccttcacaacgcaggtgatgatttctttttcgcgctggcttagggtttcttgttcgctgtctttttcctcttcctcctcggtgtgcagcaagtggttgattttggaggtgatgacatctatgtcatcgcacatggcgaagttctcgtcatattccttcaatatgttgttgtcgatgacggagcataccatagcaatgtacttgatgccggattttccgtgttctgccttgaaggcgggcaggtcgaaccagccaccgaaagtggggttgatgatgataatgtctgccggatgcatgtgaatgtagttttgcagcgattccggagaagaaacttcaatagggtgtgcattcaagttgggaatacgcttcaaaacagccgtcagaccacttcggatgatgaccgaagtttctgcaatgacaatcttcaaagaagtattattgttcatttttcagtttcctttctatttgcgctacggcgggaacaaacatataatcttctacctggcagtgggtggcaaggtcttgttcgcagttgaatatatcgaacaagaccgcattcaggagattgttgttctccttttccgggtagtatttgatgatgatgttcttcagttctttcagtttggtgtctatctgattatgtttgctggcaaaagtggcgatgttgtattcgtccgatagtctgccctggagcaagtgctctacgtaggtgaatacggcctggttttcatattccatgtggcggcgtacctccttggcatattcatcgaagaacttcaggatgaggtaggctacatcgtttgtactggaacaatcgatggcttcgatgagtttgcggcggatggccggcaggttgaagtcgaggaaatacgtgtgggcacgcttcagataatccataagggcgggaatggaaaagtcactttcattgccgctgtaagagtattgttcttcgctgataaagttggctacggcgaggaatgtggggcaatctacgccttgcgcttcgcagacgtccttcacgttcttgtctccgaatcctaatgacagtccgaagcggctcatcaccattaataaggagtaattgtcacagatgaggtcgctcattttgtccgtggagcggtacttatgttgctcattcattgtgtgttattgtttttaattctttaattcgtgcgcaaagtaacggcttttatccgagaactgcaatcactattagtaggtattttgcttgtcgggagatggttggagagtggtgtttgctggataaactaaaagctttagttttatttaacgagagaaattagtttttgaactaaataatttagttatttgcggaaaacaaagaatgttatgaaaggattgactgcaaaagaagaagaaatcatgggctttttctggggaaaaggacccttgtttgtgaaggaaatgctggcattctatgaagagccgaaaccccatttcaatactttgtccaccattgtgaggggattggaggataagggattcctaagccatcatgcatatggtaacacctatcagtattatgcggtggtcagcgaggaggattttcgcaagcggacactgaagaatgttatcagtaaatatttcaataattcctatctcagtgcagtgtcgtctttggtgagggaagaagatatatctttggaagaactgaaactgttgatacaagaggtggaaaagggaaaggattgaggtaattgaaaatctaataactcttgcttatgaaaaacatcggattggtttgttggttgctggtgagtatttgctgcggattgcaagcaaagaaaattgtaaagactccctatttcatggcttgtaatacgcgtagcatcgaagtggagcgagtgatacttggagaagacacgacttggctggatgtgaagatatacggtatgcagggtgataaggtcaggatagattcggcagccgtattgcaggcatccggaaagcattatgaatattggggggataccggtttttccagaggggaatggacaagtattcctgcttccggtgaaatgaccgctactttgaagtttaggccgcttccgatggacaccgagagttttgactttctggagatgcctggcagtgatgagggatggataatctacgacatacagctcaacgggcagaagcctcaggtggatattcccgaaaggctactggacaagaagccggatgaagttttacccttgcccgcaccggaactgaatgcaggaaaggctgtcataaaaggacggatattagggtataagccggaatatggagtgacgttacgctactatggctcgccttggttctttatgtatttcaccggcaaggacttggagattgcggaggatggcacgttccgctatgagacggaggtgctgttgccaagcggtgctgcgttgtggatatcccgttcgaagatagaattgttccttgtgccgggtggagaactggatattacaatcaatctgcccgaaatattctattcgcagagccgtcttttaagcaggaaaagcgatggggaagtggagaaccgcgtctggtttgaaggagactatgccggactgaacaccgagttgttgcggttcggtgaaatgaaaagcttatcggaagctgatgatttttattccgatatttgtgggatgactccgcaggcatataagaaatatctgttcaggcattatgaagatatgctggaggaacttgtgaaaaacaaggatatgagtcaggcttgccgcacctatatccggtcaaatctggatatgaatctattcagccttatctataattacaagagcaaccttagttatgccccgatgctttcgggcaggaagggtgtgaaaagggcggacatgacggtggacagcacctcatacttcaaggaaatactgcaactagatattctgcattctcccgcgcagaagtattatgacttttatacggattttgtgcggactgctaccggagaacttcgtgacaggtttgtgcaggacaccctttggccggacatgcttcttgccaggcgtgcttcccgtaatctgagcaagtacatgcctttgactgaggaagagcatcggacggtagacagcattgcttctcccgacctcaggcaattgttcctgatgagaaacgagaggattgaggctgaattgaaggccgggatggaagctgctaagggcaagaccggatatacggttgttgaagtaggaaaggagatagcggcagatagcttattgaaagttattacccgtccttatcgtggtaagatggtattggtcgatatgtggaacacctggtgcggtccttgtatgcgggcaatgaaaagtctgaaacctttgaaggaagagttgaaagaggtggtctatttatacattgcggatgaatcatctcctgaagggaaatggaaattgaggataccggatatacacggcatccattgccgcatcagtaatgagcaaagtacagcattggcaaagctgtatgaatatccgggcatcccgacctatttcgtagtgaaccgtgaaggagatgtctcctacaaagtaaccggattccccggagtggagatgctacggaatgaactgactaagtagctgtaaatagtaaatcgttaaatagtaaataactccatgggtctgttttttgtttatatactcaaatcatccgtttgtctggcggtattctatctgttttatcgcttgctgctggcacgtgatacatttcatcgtttcaaccggtttgcgttgctgggcattttgttgttgtcgtgcctgctgcctttggttgaggtaagtgtaaggcaagagactgaagtgcatcagaccatgctgacattggaacagttgttgatgatggcagatgcaatgaatgctactgaaaccggaataacggctgaggcggcaacggtcacctggatacaggtggcgttgttggtttatctggcaggaatcattttctttgctctccgcaatgcttgttcgttggtgcggttgctgatgttgctgaaagcgggtaagaaagaaagtgtcggcaattacttgccgggcaggaaagagcgcgttactttgattgtacacaactgtgacatcgctccgttcagttggatgggatatattgtcattccacggaaagacttggaggagaacggacgggaaatccttatccacgagcttgcccatatccataaccgccattcctgggacttgctggtggctgatgtctgcattttctttcagtggttcaatccggcatcatggctcctgaagcaggaattgcagaatatccatgagtttgaagcggatgaaacggtgataaaggagggtgtggatgcaaaacagtatcaactattattaataaaaaaagctgtcggcacaaggctctactctatggccaacagctttaatcacagtaaacttaaaaaacgtatcactatgatgttaaaagaaaaatcaagtccgtgggcacgtttgaagtatctttatgtacttccggtagctgccattgcagtgacaacttttgcccgtccagaagtctccgataaggttgaggagatttcaagtgtcaaagttaacgatttggctgcaattgtagaaacaaaagtggtggaaagtgtaggagacacaacgaaacctgccgatgtgaagtatgtacctacggaagtccgcaagcagttgaagggaactccggtctttgaactggtagaggagatgccggaatttcccggaggtggaatgagtgctcttatgggttatctgaaagacaatatgcgctatccggcatctgccaaagagaaaggtacgcaagggcgtgtgactgtccaatttgtggtggataaagatggaagtatcaaggaaccgaaacttctccgttctgtagataaggatatggatgctgaagcgttgcgtttgataagtaatatgccgaagtggaaaccggggagacagaaggggcagccggtggcggtgaaatatacggttccggtgatgttcagtttggatgatgacaaacttgagaaaacttcttctgccaatggtattacagttgaaggatatgcaggtaatgggaaagaaccactgtatattgtggatggaaaagaggtgacaccatctgtcatgagtgcattggatcctgataagatagagcgtgtaacggttttgaaagataaatctgccacggaattatatggagaaaagggaaagaatggtgttcttttgataaccctgaaacaaggaactccaggtatagttatccgtcgggataaagaggtgacagagaacgctaaagtacagcataacggtagtcttgatttaacgaagactatttatattgatggagaaaaggttgatttgggtactaaaactatcgatgatttaatacctgcggagaatattgagagcattgaggtgaagaaagaggcaggtggaaaaggtgagatttacattgctactaaaaaaactaaagctgtagaaaagacttccgttcaaggtaatatgaaagtggaaggcaaagtggtggatgagcagggcgagcctattattggtgcggctgttctgatagaaggtaccactacgggaagcgttaccgatgtcaatggtaattttgtcctttctgttccttctaaggatgctgtattggttgcttcgtatataggcatggctaccagcaaagtgaaggcgcaatccaagcttacgattacactaaaaaatgaatagtctctaacaactatgacaagtaaaattctttctttgtttctgattctgatagctgtgggggcagggctttgctctgcccagacagcaggtaagaaatattatttagtggatggccttttcttcgaaggcatgccaccttgtgtggattcggataatgtagcagcctacgttatacataaggacggcgtgggacacgaggttacagaacttcgtttgtgcagggattttgtgctgcctgaagatgtgagaaaatacgctactcctgctgaagaggtgtctggtgcggaagcctttttgatgagttatcgtggagggatagggcagaagctcccgatagtctctgtcgtacggactctgaagacagaggaatggataggtaaaccctttccagaattcaaagtaaaagataccgcagggaaggagtggactaataccgatgtagtgggccgtcctatggtcttgaacttctggtatactggctgtggcccttgtatccgtgaaatgccggagctgaacaaatggatggaagtctatcctgatgtaacctatcttgctacgacttttgacagtgctgcacaaataaagaaaattgtagagagccgtccttttctctttacccagatagccgatgacttgtttttcttcgagacctttcatgtgagcggtatgccggtcactatactggtggataagaaaggtattatccgccatatagaacaaggtactggaactgcgaaacttcggtatatacaggataagttgcagaaacttgtcagcgaataattctttcttgatgaatagggataaggatttcagaggatttcttttgctctttcacagattatcatacctttgcgaatataaatctaaggaaggggaaggttatgataaaacatctttttttaatattgggactgcttgctgcgctcacttttgccgagccggttctggcttgtacatctgccgtcgtttccggaaaggttactcttgacggccgtccgttgctatggaaaaaccgtgatacggactatctgcgaaatcatgtagcttatgtgaaaggtgagaagtatgacttcattgccgatgtgaatagtgacaatttccctgatttgaaggaggcatgggtcggtaccaattccgccggctttgccttgatgaacacccaatcctacaatctggtggaagtgaaagatggggaagaacggggtgccgccaacgggaggattatctaccgtgctttggaggtttgtgccacggtggaggacttctgccattttcttgataccatcaccaagcccagcctgatagaagccaattttggcgtgattgatgccaaaggcggtgccgccatgtttgaggtggattactataaatatacgatgtatgatgccaatgatccgaaagatgctccttacggttacattgcccgtacgaacttttcttttgccggtgaggtgaaccggggagcgggttatgtacgctatatggaggcagaccgggtattgatgaaggcttctgcaacgggtggggtgacacctcagggtatcttcaatgacctttcacgttcgttccgcaattgcatgctcgatattgatttgaggagcgggaagtttaatcgcccgcaaggttccggttggtttgtcgaccaggattttattccccgtaacagcacttcttgttccattgtggtgcagggcgtaaaaccgggtgagaaggcggaacttactacgatgtggacaatgctgggatattctcctacgggcattgccgtgccactttgggtgaaggatgcggataaatttctgccttcgatggtatgttgggacaaggcgtgtgctgccgctccgctcagtgattggtcactccggctttccaataatgtcttctgttacaatcaggggatgggaaccaatcgttatctgaattgggaaaaactgtacaatatggagaataacggctatatgcaacagcttgttccggtggaggcggaggtgtttcgccgtacatgcccattgttggacagttggagacagcaaggaagcattgattctcaagaaatgcagaagctttatcaagatgtggaagcacttgtccgaaaggcttatacgcctttgatggagcaatgacagtattccagtatttctctttcctgctcagggtggaaccagcggatttcctcgtcccgtttgaaccaggtcatttgcttacgggaatagatgcgtgagttctgctttatcttctcaatggcaaagggtaatgtccattcgccgtccaggtacttgaatatttctttgtagcctactgtatttagggaatttagacttttatgcggatagaccatgtgcgcttcttccaccaaaccctcttccaccatttggtccacccggcagttgatgcgttcataaagctcttcccggtcacgcgttaatcctattttgataatacggaaggggcgttctttcttttgttgggtgcggaaggaagtgtaggtcttgcccgtcatatagcagatttccaaagcatggactacgcgttttgggtttttcaaatctactattttgtaatattccgggtccaacagcttaagttccgcacaaagtctttccagaccttctgtttcgtatttgtacagcatgagttggcgtgtatcggcatctacggtcggaatgtcgtcaatgcctttacagactgcatctacatacatcattgagcctccggtcagcagtatggtgttatgctttgtaaacaagtcttccagcagcttcattacttccgcttcgtattgggcggcactgtaatagtctgtcagcttcagggtaccgacgaagtgatgctgtacccgttgcagctgctccggtgtaggggcagccgtgcctatctttaaatctgcatagagttgtctcgaatcggccgagacgatacaagtatggaaatgttctgccaatcggaggcttaattctgttttgcctactccggtggggccgataagtacgattagggtgtgcatgcgggtataaaatttaggcgcgaaccataacaatccgcgcctttctgaaggggaataatgtctgtttaatatttctcttcttcgaaggagttcccggcttcgtccaaaccgccgaaaccctctttgtcgaaatcttccatatcgaagtcttggtcgccgtaaaagttttcgtccaagtccagggaaccgccggcagctgccatttcttcaaagtcaacggtctgcttgggagcttcacccgctttcttggtgcatttggcgcctttcatttcttttccggtaatgatttcagaaagctcgatgaagaagcagcgttcagtcatataatcgaatacatagagaagtttctgcttctcgtcttcaaccagttcgctcagctgggtctctttcatcacccaactgtccatttccggattgtcgtccatttcttccagcgtaatttccttttctttttcccagtcatcatcgcaaatgaagaaagaagtcatctggtcgttggtgtagcctgccgactttagaatcgcctcatggaagtcataaaaggtagcttccgggtctatctgtatttctctgacaaaatcgtccacctcatcagagatgattgtaaatctgtagatcatgatgatttataatttatgatttctgacttctgattttgtgtaaatcatacgtttttcattttcctgcggggataatgccgcgggctgattcacgtataaagtttacgatatagcttatttccggtgtcatttccatttcatcctcgattttcttcaaggcatccgtattgttcaggccgccttgatagatgatgcgataggcatcatggattttctcgatggtctcgttggagaagccgcgtcggcgtaaccctaccacattgattcccgcatagcagataggctcgcgtccggcaatgatgtacggcgggatgtccttgctgaaacggcagccgccctgtatcatgccgtaaccacctacatggcagaattggtgcatcagtacattggcgctgatgatggaataatcgtcgatgacaatttcacccgccatttttgtagagttgccaatgatacagccgttgcctattagggcatcatgcgccacgtgtacactttccatcaagagattgttgttgccgacaatggttctgcctttggcagctgtaccgcggttgacagttacgttttcacgtatgatattgttgtctccgatttcagcagtgctttcctcccctctgaactttaaatcctggggaatggcaccgataacggctcccgggaaaatggtgtttccattgccgatgcgtgcaccgtacagaatgttggcgtttgccataatcttgttgttatcaccgattaccacattcttgtcaatgaaaacaaaaggagcaatttctacgttttccccgattttagcttcgggatgaatatacgctaagggacttatcatattatttacgatttagctatttacaatttacgattgagattacttgcgatttactgtatatacgattttacccgaaggtgataattcttatgggtaatatgaatcgtaaatcgtaaatcttctaatcgtaaatctatttatttgttcttaactatttgtgccataaactctgcttcgcagaccaccttttcgcctacgaacacataacctttcatggtggagatgccgcggcgtatgggggccatcagctctacacggaagatgagcgtgtctcccggtaccactttctggcggaatttcacaccgtcaatcttcatgaagtaggtggagtaacgttccggttcatccaccgaattcagtacaagcaaacctcccgtctgtgccattgcctctatctgcaatacaccgggcattacgggttcctgcgggaagtgtccctggaagaaaggttcgttggaagttacgttcttgacacctacaatgtagttggcacctatttctatgactttgtccaccaattgcatcgggtaacggtgaggcagaagttcgcggatgcggtttacatccataatcggttcgcggttgcagtcgtaggtaggagcctgtatttcgtgcaggcggatttccttgcgcatctggcgagcgaacttattgttgatggtgtgtcccgggcgggtagcgatgatacggcccttgatgggcttgcctatcaaagccaggtcaccgatgacgtcgagcaacttgtggcgggcgcattcattgggccacaccaaaggtttgtggttgatatatcccaattgtttggcgtccatgtgaggaacacccatcacatcggccagcttgtcatagttctcctgggacatttcgcgttcgtaaataacaatcgcattgtcaaggtcgccgcccttgataagaccggcttgcagcaacggctcaatttcgcgtacaaacacgaaagtacggcttgcggcgatttcatccttgaacttcgtcatgtcttccagcgttgcaaactggttggggaggatgttggagtcgtatgataccaatacattcaagctgaagttctcgtccggcaatacgatgatggaagagccggttgtttcgtcacggaattcaattttggacttgatgatatagaaatcttttacggcattttgttctacagtgcctacgcgctctatttcgttgacataatattgggcgcttccgtccagaatgggaaattccggtccgtttacctgtatcaggcagttatcgatacccaatgcatagagggctgccataccatgctccactgtgctcacctttactccgtttttggagattacagttccacgggtagtttcggatacgttgtctgcaacggcatcgaaggttggctgtccttccaggtcgatacgttggattttgtatccatggttatccggagcaggattgaaagtaacggttaggtcaagtcccgtatgaagaccttttccactaagcgaaaagctatctttcagagtcttttgttttaacattggttacttatttaattgttgtttaagttcattcaattctttgcggagctggcgtagctccacttgcatttccggcaaacttctttgtacgatggatgccttgaaatattgtttcagctccataggaggggtgccgataagctggctgccgtcttttatgctactgggaacaccagactgtgcgccaaggtttactttattgccaatatgaatatggcctgcaatgcctacctgaccgccgaacatgcaccattctcctatcttggtagaacctgctatacctacttgcgccgccattacggtgtgggagcctatttcatcgttgtgtgccacctggattaaattatccagtttcacgccgctatgtacgatggtagctcccatagtagcacggtccacacacgtgttggcaccgatttccacatggtcttccagaatggtaatgcctatttgcgggattttttcataaccctcggaagtgggggcgaagccgaaaccgtctgcaccgataacgcaaccggagtgcaggatacagtggtttcctacccggcaatcgtggtagatggttgaattggcgtaaataatacagtcattgcctactttggcaccgctgccaatcgtgacgtgcggatgaatgaccgtattgtctcccacctctgcatgctcgtcaatgcaggcaaaaggcgcaatgtaaacatccttgccaattttagctgtttcggcaacaaatgccagagagtcaattcccactcgctttggtttactttgctcataaagatttagcaatttagcaagactttcatacgcattgtccactttaatcaaggtagctttcacttcttgttccggaacaaagtccttatttaccagaacaatgcttgattgggtttcgtatatgtagggggtatatttggggttggataggaaggagatggctcccggtattccctcttcgattttcgcaaaggtgtgaacggtagcattctcgtctccaacaatttctccttggataaatgttgcaatttgtttagcagagaactccatgtcttattcttgttagatggtttcaaaacgcaaataacggactttttttttatatttccttgtcctgaggtgaatattttatacttatctatgcaaacgttggtagcataagtagtatttttttactttcttggacagaagagagatattgagcatatccgatgcttcggcaatattcttgatgctgccgtcgttgtagaggatgtcaatactgtcatctgcctcgtcgtacatattcttctcgatgctgggggtagagatgaaatatctcgcttcggagagagggatgttcagttgttcactgatttgcaaagttagtgcttttttccgttcctcactaataggttcggtagaaatctcaactttgaagatgtttcggttaatcatgccggcgctcaaggtggacaaaaccttgtccgaatggcggctccataccttgagggcagtccagatgtcattatcgtccaactgaatgaaattctccaaacattcgggattgttgtagaatgcctcccggctgatgtcgttgtatagaaagaatttcaaggcgggtgaggcaaagaggtctatgccgcggcttgccagttccttggcgcggagcagggcgctaatcagcattttctcgtaggcaacggaggtcttatgcaggtagacctgccagtacatcaggcggcgggcggtgaggaagttctcaatagaatagatgcctttggactctactaccaggtggtcatcctttacatccagcatcttgatgatgcgggcggagccaatgttgccttcggtcactccggtatagaagctgtcgcggcgcaggtagtccaggcggtccatatccagttgcccgcttaccagttggtgcaggaagcgcttggggtattcatccttgaaaatttgaatggcgagtgtcaactgtccgttcatttccttgttgatacgttccatcagcatcaaggagatgtcttcgtgggagacgccctgcacgatagtattttccagtacgtgggagaaggggccgtggccgatgtcgtgcatcaggatagcggcttccacagcttcggcttcgctgtcgaagataaagtttcctttggtggcaagttgctggatggcctcactcatcaggtagaaggctcccaaagagtgttggaaccgtgtatgctgcgcaccgggatatacgacagaggacaaccccagttgcttgatacggtttagacgttgcaaaagaggatgtcgtacaacatcgtacaacaacccctttggtatgttgatgaacccgaagacagggtcgttgataatctttctttcgaacattaagcgttagccgttaatcacttttttcaactcttccgccatctgtgcctgcacttcttgggctgcttttcggctggcggcggcgaagttctctgtcttgtccacgtagatgatgccacggctggagttgacaatcaggccgcaagtcttgttcatgccatacttgcagacttcttccagggagccgccttgtgcgcctacgccgggaaccaatagaaagtgttcgggaacaatcttgcggatatcttcgaaggcgcggccttgtgtggcgcctactacgtacatcatctgttcgtcactggcccactcctgggatttgcggagcactttttcgaagaggcgttcgccgttggtgtcttccgtcagctggaagtcgtgcgagcctttgttgctggtcaacgcaagcaggattacccatttgccttcgtacgtaaggaacggggtcacactgtcttcgcccatgtagggagctacggttacggaatctatatccagctcttcgaagaaggtgcgggcatacatggcagaggtgttcccgatgtcaccgcgtttggcgtcggcaatgatgaattggtcgggatagttctgcttgatgtaatttacggttttctcgaaagctatccagcctttcacgcccatactctcataaaatgccagattgggcttgtaggcgatgcagaggtcggcagtagcgtcgatgatagctttgttgaaagcgaatatagggtcttcctctttcagaagatgttcgggtattttcttgatgtcggtgtcaagacctacgcaaagaaatgacttcttgcgcttgatgttctcgaataattgctgtttgttcatattattttttagttacgggctacaagctacgagctacgagagatagcgtgtgggctggcagctggttgtttttttagttatgagttacgagctacttgtcacttgtttcttgtaactatcttacagctcgctctctttcagcctttctgcattttccgccacaatcaggtggtcgatgcagtcttggatgtctccgtccataaaggcggcgagattataaatggtgtagttgatgcggtggtcggtgatgcgtccttgcggatagttgtaggtgcgtatcttggcagagcggtcgccagtactgaccatcgtcttacgcttggaggcgatatcgtcgatgtacttctggtgttccttgtcgtagatgaaggtacgtaggcgcgagagggcgcgttccttgttcttgggctggtcgcgcgtctcggtacattcgatgaggatttcttcgactatgcctgtgttgggattcttccagttgtagcgcaggcgcacgccggattccaccttgttcacgttctgaccgccggcaccaccgcttcggaaggtgtcccacttgatttcaccttcgttgataactacgtcgaactcttcggcttcgggaagcacggctacactggcggctgaggtgtgtacccgtccttgcgtttctgtggccggtacgcgctgcacgcggtgcacgcccgattcatatttcagtgtgccgtatacattgtcgcccgtcacggagcagacaatttccttgaaaccgccggctgcaccttcgttggcgctggatatctccattttccatcccttggattcgcaatacttggtgtacatgcggaagaggtcgccggcaaagattgccgcttcgtcaccacccgtgccgccacgaatttcgaggatggcattacggccatcctgcgggtcggcggggacgagcagcagctttatctgctcttccagttccggttggcgggcttggcaggcatccagctcttcgcgtgccatttcccgcatctcctggtctgtttcgttggcgataatttctttggcttcttctatgccgcccagtacttgcatgtactctttgcgggcattcatcaggtcgcccagttctttatattctttggtgagcttgacgtaacgcttctggtccgcaatcactgccgggtctgtaatcaaggtcgacacttcttcgaagcgggcgacaagcccttccagcttttcgagtatggtattgttgtctgccatatatttaatacttgaactctccgaattcgctcttgataatcagttctttcttgtcgctttcttccacgcggcctacaatctgtgcatcgatgttgaaactcttcgaaatagcaatcacctcttctgcatgttcgggagagaggtacacttccaggcgatgccccatattgaacaccttgtacatttcactccagtccgtatcgctctgctccttgatggtcttgaacaacggtggaacggggaagagattgtctttgatgacacggcagttgtctcccacaaagtgcagtaccttggtttgtgcgccgcccgagcagtgtaccataccgtggatttggggacggagcgcatcgagcagtttctttactaccggtgcgtaggtgcgggtaggggaaagtaccagctttcctgcatccagcggactgtcttcgacactgtctgtcagttttagcttgccactgtataccagttcttcgggtacagccttgtcatagctttcagggtatttctctgccaggtatttggagaatacatcgtggcgtgcgctggtcagtccgttactgcccataccgccattgtattctttctcataagtagcctttccgtaagatgccagaccaacaatcacatcgcccggacggatattggcattgtctataacatctgagcgcttcatgcggcaggtcactgtcgagtctacgataatggtacgtacaaggtcgcccacgtcggctgtttcgccaccggtggcataaacgcctacacccatctcgcggagttcggcaagcagttcgtccgtaccgttgatgatggctgaaattacttcgccggggatgagaagtttattacgtccgatggtagaggataccagaatgttgtctaccgcacccacacaaagcaggtcgtcgatgttcataatcagtgcatcttgtgcaatgcctttccacacacccaggtcgccggtttccttccagtacatataggcaagactggatttggtgcctgctccatcggcatgcataatgttgcaatactccgggttaccgcccaaaatgtcggggataattttgcagaaagcctgcgggaaaatacctttgtcgatgttcttgatggcgttgtgcacatcttccttagatgcgctgacgcctcgcatcatgtatcgttgattactcatgagataataggtttgttcaattgaatgtgcaaagatacatctaatcttctacaacacaaagcgaggcacaaagtttctcgcctttgtgcctcgctatagagttgtgtatttatcagaattgtacctggggagcttgttccgctccttctgccgcttcgaaataagctcgtttctcaaaaccgaagagaccggcaaggatatttttggggaaacggcgaatggctgtattgaagttcttggctgcattgttgaagttggtccgtgctacgttgatacggttttccgtaccttccagctgtgcctgcagttccaagaaattctgatttgctttcaagtccggatagttttctgtgatggcaagcaatttaccgagggcagaagtcaccgcaccttgtgctttctgatattcagccagcttttccggagtaaggtctgcagcatccactttgatttgagtggctttgctgcgggcttctactacaccttccagtgtttccttctcgtgcgtggcatatcctttcacggtattcaccaagttcggaatcaggtcggcacggcgttggtattgggtttctacgttcgaccattgtccgctgacattttcgtccatggttacgagtccgttatagccggttacaccccaaatggcgagaagagctataacaacgataatgataatggttgatttcttcatacttttcatttttaggcctcacctccgattcctctccgatagagagaggggaggaggggaaggcagttattaatcatttaattatattctatgtaaacgttttattttcttccagtatcctcgaaggtgtgtcaaaacggttgatggcgcacagatgacacatactcggcgttagaaccgggaaccggctccaccgccacctcccataccgcctccgaagctaccaccgctgaagcctcctccgccacttccgccgaagagacctccaccaccgaagatgaccggaccacctccgcctcctccccggtagttttcatcgtatgactgctggcggcgcactactttatgtccgcaattgcggcaggtgtaggtcacatcttccgttttcactccattgcggcgtgagatgagtatgctgctgctacgttgcaatttatgttgtccgcagttggggcatttgttggcagcgcgttgggcaaggatgcctataatagatgccactgcgaggaaaccgataagtcccagtaggatacctcctacggagaggtcatcctcctcttccgtgtcattcaccatagtgccgtcaagacgtgaacagaccgcctttacacccgcgaccattccggcatcccaattaccgtcttttagatagggaatcatatatttggtctgtatgcgtttgcagatggcgtcaggcaggtccccttccaaaccgtatcccgtataaaactggatgcagcgttgatcggttaccagcagaatgaccagaccgttgtttttctcttttttccctactccccattcattgagcagccggtgtgagaaatcaaaacagtcttcttgtccgatggagggaacaacggcaactaccgtttcaatacccgtctgctgctccaatgcgtagagcatgcggtctatgtcggcacatgcctctttggataagatgtcggcagggttgcagacataacgcgtcttgtcctgaaggtgtactttaggaatgttcttagtggtgtagacttcttgtgcctgcaaggatatgaacaagcacaggaagaatgctatggaaataaatcgtttcatattaccaatgtttgttgcggcgaagataggaaaaatcacgtcaatgtatgtatttccctacgaatttctttacatgctcggtgtattcctgcggataatccttgtaagacatggcatgtgtggcaccgggtacaatccataattctttgggttcgggcttggcttcatagaggggataaaccatccacgtcggtacaaaggtgtcggcatcaccgtggatgaagagcatcggcaaagtacatttctttacttgctccagggcagaagcttcgcggaaatcccatccgtactcctgccggcaaagccagcttgcagtatgcagtagggggaaagagggcagtccgaactgttctttcaactccccgcgaaactcatcccatacgcttgtgtaaccgcagtcttccacaaaacacttgatgaatggctgttggtattgtccgtgttccacttcgccggataccatcatggtggtggcggctcccatggagatgccgtgtactaccatctttgtactgcgggacgctatgctgtccgtatggctgcgtccgaaaagctcatcggcggtttcggtccattgcaacacgtcgagccggtctttccagcccatctgtacatggtttccttcgctcatcccgtgtccgtaaaggtcgggcagcaggatattgaaacccatctccttgctgtacaaataacctatcatcagcatgcgcacggcgttgtccgtatatccatgtacgatgactgccgttttgtcggtagggcgggcagcggcaacatagagcgcatgcagcgtctctccgcggtcgttctcgatgtagaagtccttcagtgctcctgcggtcatcaggctatccacccaggggtgcagttcggggtagcgctcgtacatgaaatcgtaggatgcggctatgttgcggctgcgtgaaacgaggtcgtccggtttcagggaatagcccagcatatagtaccctccgcacaacagtagggtgcagagggcggccagactgagaattgaatattttatggcttttttcattatttattccaaatttcccatgcggcaaaggcctgcaacagcaacatctccagtccgttcttggtgacggctccttgtgcctggcctttcttcatgaagagggtttcgtttggattatataacaaatcgtagagcaaatggttgggggtcagtagctcgtaaggaatgttgggacagaagtccactttggggtacatgcctacgggggtacagttgacaatcaccgtgtactcctgcatgatttccggtgtcagctcttcgtaagtgaggtatttgtcctctttcttggtgcgcgatacgaaggtactttttatacccaggttctccagcccgcgatatacggctttcgatgcgccgccggtgcccagaatcagggctttcttgtgatgtggttgcaaaagcggttctatggattgtgtgaatcctatgatgtcggaattgtagccaaccagctttaccttgcctttgggaaggcggataatcttgatgacattgacggcgcctatcttggcggtgtctttgtccagttcgtccagataggggatgacttgctccttgtagggaatggtcacattcagtccacagaggttagggttttcctctataacttccatgaaatcctcgatacgtggaatttcgaagtttacatattctgcatcaatgttttctgccgtgaatttctcattgaaatatccgatggaaaaggaatgtttcaacgggtaacctattaaaccgtatttctgcataatgagggtgtgttaaaggggaattaatgattattttctggctgtatacaacgtacatattccgaaagtgagccgcttgaagtgtacttcactgaaaccggccttgcggataacttcctgcatcacttctccttgagggaaggcacggatgctttccggcagataagtgtaggcgctgttgtctttcgaaatacatttaccgagcagggggataacgactttggagtaaatggtaaacagttgtttcatcgggaagcggtccggcgtggagagttccagtatgacaagatgtccgccggccgtcagtacgcggcacatttcggacagtcctttatccagcccttcgaagttgcggatgccgaacgctacggttacagcatcgaaactctcatcggcaaacgagagagaggtgcagtcctcccgggcaaatgaaatcttgtccgagaggtgcgcccgttttactttttcgcgccccacattcatcatgccttccgagatgtcggtaccaatcaaagcatcgggttgcagttcgcggcatgcaaggatggcgaaatcaccggtgccggtagctacgtccatgatacgtcgggggtggaaaggaaggaggtatttgattgccttcctgcgccagctgcggtcaatacccatggatagggtgtgattcagcttgtcgtaggcgggagcgatgttgtcgaacatttcttccacttgttcgctcttcttaccgtcagcgccgtagggcttgatgtgttcttgggggtaatccatgatttttttatgtgctaatgtgctgatacgccaatgtgctaattggctgcgctattatgccgcaaggtcattagcacattggcatattatcacattaagtaattagttacattcttttcaatgcgttcggcaatgttgtcggtatcttcctttacgaacttctcgccagtgatgtgttcgtacagttcgatgtaacgttcgctgattgaagtaacgatttcgtctgtcatttccggtacctgctgtccttccttaccctgaaaaccgttgtccatcagccattcgcgtacaaattccttggaaagttgtttctgcggttcgcctttggcaaaacgttcttcgtagccttcggagtagaaataacggctggagtccggggtatggatttcgtccatcagataaatcttgccgtcgtgcttgccgaattcgtatttggtgtctaccagaatcaatccgcgttccgctgcaatctctgtaccgcgtttgaagagagccattgtgtatttttccaatacggcatattcttcgggcgtggcaagtccttgtgctaggatttcttctttggagatgtcggcatcgtgttcgccaatttcggctttggtagtcggggtgatgatgggttcggggaacttctggttctccttcattccttcgggcagtttcacaccgcagatttcacggacaccgcttttgtaagcgcgccatgcactgccgcagaggtaaccgcgtacaatcatttctacggggaatccttcacacatcacgcctaccgtcaccatcgggtcgggagtagccattttccagttggggcagatgtcggtggtggcatccagaaacttggctgcaatctggttcagcatttgtcccttgaaaggaatgcctttgggcaatactacgtcgaaggctgagatacggtcggtagctaccatgaccaacttctcgccattgatgttgtacacatcacgaaccttcccatgatagacacttttctgtccgggaaagttgaaatctgtttttgttaatgctttcatctttgtaatatttacgatttgagaatttactgtttctgttcaatcttgctattggcttgttcggccttgcgtctttcgcgctccgctttcgcttctttgtcaaacttttcgtaggcctccacaatttgggtgacaagcttatgccttacgatgtctttcttgttcagttccacgaagctgatgcctttcactcctttcagaatacggagtgcctgcaccagaccggatgtctgggaggaaggcaagtcaatctgcgtcatgtctcccgtgacaatcatcttggtgttcattcccatgcgggtgaggaacattttgatttgctgggtggtggtgttctgcgcttcgtccagaatgacgacggcatcgttcagtgtgcgtccgcgcataaaggcgaggggggcaatctggatgatgttcagctccatgtactctttcagcttggcagcaggtatcatgtcctgcagggcgtcatagagcggttgcagatacgggtctatcttgtccttcatgtcgccgggcaggaaaccgagcttttctccggcttctacagcggggcggctgaggatgattttcttgatttctttgtttttcagtgcccgcacagcaagcgcgatggcagtataagtctttccggaaccggcaggaccgatggcaaacagcatgtcgttcttggcaaaagcctccaccagtttcagctggttctcgctgcgcgggataatcggctttccggttacgctgaatacaatgacattgcccgatttctctgcttgcggggcattgcctttgatgatgtctataatgacctcttctttcaaagagttgtactcggcacagtgtttttccagtttggtgatgttctcctcgaatgcacacatttcctcctcatcacccaatactttgatgacattgccacgggcgatgatacgaagcttgggatacagggcttttatcagttgcatgttggcgttgtttacgccgtagaatattaccggatcaatatcttcaagaacaatcagtttttctatcattgatatgctttaaagttcaattcgttcttttagtgaaacgttttgcaaatgtagtgaaacgtttggatacttaaatggttctatcgggtattttttttgcagaggcttcgggtagattgccggcaattgttgcacgacgatgccgtttcctttttttgagcatccgatgcgttgccggttcagcgtctgctccttcatgttgaagatgatattggggtcgaagtgctggccgttgactcgtgtctcaaagtggagatgctcggtagaggcgcgtccggtacgtccggtcagtgcgatgggctgtccggctttgaccgtgtcgccacaatgtacaaggtttttgaagttgtggctgtatatcgtttccagtccgaagtcatggcgtacgacaacgacattgccgtaggcgctgtaaggcttggacatccgtactacgccgttgaaggcactccgtatggtgtctttggcgcaggtcttgatgtctatgccgctgtggcgtccccgcccccgtccgtaaggggagatgacttttcctccgggcagaggaaaggagtattccgtgtccggaatgtcctccaaaggtagctctatcagttctctttgcgaaaacagtcctggagtggcaacgcggatatggttggtttccatggcggaaaagaccgcttttttcccttgtgccgtggcaccaagggctatgagtaggagagggacaagaacgcgtattctcatttattcaaaatattgtatggtcccaccggtagaggaagcatatttctccaacagtcccaatatcatttcggctgcttctttcaggccttcctgcccgttgtagccgttgacaatggcaaggatatggcgggtttccagtttcatcttggtgcgttcgtggtcactggtcggggtaccgataccgcctatacggtcgcggtagacgggtagcccttctatgttcagcatgccacggcctataccctcgaacgattcctctgcacgtcctatgcccagttcaaggtcggttccttgtatctcgtcggcatcaaatccgccgatagagtgacccgtacgtaaggaaacaaggttgataaggtctaccaatgtatctatctgatagagttccaatccgcgtagcagtcgtcgtctcagtgcttcggccgagggacggtagcggctggggtctttgccgcaacgtttgtaggcttcacgggtggcggcaatgacaggttggtacttgatgctgtccgtggtttcacgggctcttagctcttgggtgaaagttgcgatttcctgccacaacccttcgctatatgcggtatttgtcacttcggcaaatacggccgcaccacggaattcggagcaattctgtttgatttctttagaaagtgtgatatgatacattataatatgcttgaatatgttctttatctcaatttcattttaacatgattcctgacagtaatcttccggatttgatacccagcctgcgtgcggagaagaattcttcgtgtcgggtgtatgtgcagatgcctgccgtctccacttgtgcggaaggtactccgaagtccagcagttgcagtcggttggcagcccataggtcgatatggtatttgtgggtgtcgggtttccattcggagatgtaatccatctggaaaccgttcttgcggaatgtttcatagacttcgtcgcctacctcgaaggcagaaagggagatgccggggccgatgcaggctatcacttctttaccctctgtgccatagcaggcactcatcttgtcgagtgtgtggccgaggatgtaattcacagtgccacgccatccggcatgaacagcggctatcacggcattcttccggtcgtagagcaggatgggaatgcagtctgccgtagagatgcagatgcagcagcccggttcacgggttatcagtgcatcaatgccctgcaacatggagtggcgttcttctgctgttgcatgcagataagttccgtcaatgacaagtgcctttgtcccgtgggtctgaaacgggatgaccagttcttgggggcgttggggcagggaagaacatactatttcctggttgcggcgtacagcttcggcttcgtctcccgtgtaaggtgtacagttgagggaggcatagttatcttggctgcatccaccgtggcgggtggttacaaaacaagaaatgccgggatatgaggcaagcagctcatatcccaacattttcctatcttctgtaagaggaatcattttttatcttcctcccaatcttcttcgtattcaaagtcctcgaggtcctctatgtccttgtcgtcattgacgtattcatagctgaggtcctcgtcctcaccctcttctttcaattcttcctgcaggtggttgaggtctttggcgcgatgggcaatgctgtccactttgccttctatcttattactttccttgttcagctcttcccaaaggatgtctttcagcgtagagatgcccatgccggagacagcagagatgaatatatgcggaatcccttcgggcagtgtcggctctatctcgtccatcagttcctggtcgagcatgtcgcatttggtgacggcaagcactctctgtttgtccagcatttcggggttgaaagtgcgaagctcgttcaataggatttcgtattccttacggatgtcgtcactgtcggcaggcaccatgaacagcaacaatgagttgcgctcgatgtggcgcaggaaacgcaatcctaagcctttgccggcactggctccttcgatgatgccgggaatgtccgccatcacaaacgatttgctgtcgcgataggacacgatgcccagattgggttccagcgttgtaaacggataattggcgattttgggcttcgccgcagaaacggatgccagtaaagtggattttcctgcattggggaaacctaccagaccgacgtctgccagcagcttcagttccatgattaccgtcaactcctgcatcggttcgcccggttgtgcaaagcggggagcctggcgtgtggcggttttgaagtgccagttacccagacctccgcgtccgcctttcagcaagatgacttcttgttcgtgctcggtgacgtcgcagatatattcacccgtttcggcgttgtacaccaccgtgccgcagggcacttcaatcaccttgtccgctccgtcttttccgaaactgcggtttttggaaccggattctccgtgacctgccaggatgtggcgatcgtacttcagatggagtagcgtccagtagttgcggttaccccgcaggatgacatggcctcctcgtcctccgtcacctccgtcggggcctccgttgggtatgtatttctcacgccgcatatgcgtagaacctcgtccgccctttccggagcggcaatatatttttacgtagtcaacaaaattcgattcagccatattctgttttattgttatttcactgcgtcaatagccttgcaaacatcggcaaagatttcttccaatacgccgaagccctggatgtgttggtatttgccgtcctgcttgtaccagtcaatcagcggagctgtctgtgagtggtaaaccaccagacgcttcttgattgtctcttcattgtcgtctgcacgtcctgattcttgtccgcgcttgatgaggcgcttcatcagttcttcttcgggcacgtcgaggtcgagcatcacgctgacttcctgtccgcgttcggcgagcatcttctttaatgcttcagcctgggcgattgttctggggaagccgtcgaaaatcacgcctttgctatccttgaagctgtcgaatacgcttgccagaatatcaatcatcaactcatcgggaatcaactggccctggtcgatataacctttagcagtcttgcccagttctgtaccgtttttcatttcagcacggagcacgtctccggtagagatgtggttaatgccatacttttctacaatcttttcactttgtgttcccttacctgaaccgggagcaccaaaaattacaatgttcaacatttgcttagttattatttaatgatttactatattatgtctgtatcagtctactacagtataaatgtcgggatagttgcgcccgaagccgtcataatccaacccgtagcccacaatgaagtcgttcggaatattcatggccacatattctatgtttaaatcaactttcagcttatcaggtttcaccagtagggaggcaatatgaatctccctgggaccgcgagtgccgagggtgtccagtaagcgttgcatggtgagtcccgtatctactatgtcctctacaatgaccactgtacggtctgtgaggtcttcattgatgcctattacttccttgattaccccggtagaggatactccttgataagatgctaatttgacaaacgaaatttcgcagggaatcgtgattcgtttcagcaaatcggcggtaaacatgaacgaaccgttcagtacgctgaggaatagaggattctttcctgccaggtcgcggttgatttcgttcgctacacgggttacttctttcagtatgtcctgctccttgatggagactgtgaacatcttgtcttttatttgtatggtatccatagatgggatgtttttagaaagttgccgcaaaaatacgatttttattccactccatgcatcatcttctgtaatttctttgaaagcaggaagaggataagcgatgccgtggcagacatgacgacgaacaccatgaagaaatcgtacatcgtctcgatgcgataacccagcagcgtctttacttttccggcttcggggtagagcccgctcaacgtgcctgcaaacttattggcagtggcggtggagaggtaccatatccccatcattagtgaggcgaagcggatgggcgtgagcttgttcaccatggagagcccgatgggcgagaggcagatttcgcccatggtatggatgaagtagagccccgtcagccagatgagactcaccttgatgcccggctgaacatctttcaccccaaagcagatgacgagatagcccagtgaaagcagtagcaggccgatggcttgcttggtgggcgaggcgggctccatgccccgtttgcccagggcgccccatacgcccggcatgatggcggcaagtatcactacaaagaaggggttgaaggactgaatccaggaggcgggcatttcccaccccaggatgacgcggtcggtctgctcggaggcgaaaagcgtgagcgaggcgcctgcctgctcgtaggccgcccagaagaaaatgacgaagaaggcgatgatgtagatgacgaagatgcggtcgcgctccgtcttggtgagcgagccttccagcaggatgctgacgggaaacacgatgcaggcggtgaagatgccgatgcttatccaatcgctcccgaaacaccggtagaagaaaccggcaagcgcgatggcgagcagggcgagcagcaggtagttgcgcatgggccgtccgttggcgtgggcactcttccgggcggtgttgtctgcctggggccgctccttgcgggcgtcggggataatgccgaggggcttgccgtcggggccgatgaggtacttgttcttctgggtttcgaagaggacgaccgtcagcacggtgacgatggctgcgatgaggaagccccatcggaagtcgtgaggattgcccgtctcgccaaagtagccgcagaccagcggggcgaggaaggaacccacgttgacacccatatagaagatggtgtaggcggaatccagccgtttgtcacccggcttgtagagttgccccaccagggaggagacggtgggcttgaagcagccgttgcccaatataaggaaagtcagtccgccgtacatcagccaatgcgaaagctcacgcgcctccagcatcgaggcgctggcaaacatcaggaactggccgactgccatcatcatggccccccagaagacggaacggcggatgccccagtatttgtcggcgatgtagcctccgattaagggcgtcaggtacaccagtccggtgtagctgccgtagatggaggcggcgtgctccttgtcgaaaaggagcgcctgggtgaggaacaggatgaagatggcacgcatgccgtagtagctgaaacgctctgccgtgctggtggcgaagataaggtaaagacctttcgggtgtcgggatgtactcattgaatatgcttttattgttttggcttttattatatgttgagggtacaaaattagtcattattttgcgtaagttaatgggtataattagaaacttgccgacaagcctgcgggaacttgccgacaacttgtgcaaacttatccgtaagcctacgcaaacttaaaacagaatttctgtttctgtaaataaagcttttgtttatagaaatagagcttttgtttctaagaataaaggctttgttctaagaatcctttgcattgaagacaacttttccttacagagcagatattttttcccgggggacaaagcaacttgataaaaaacgtcttctctttgtacagttgaaatcaaagccctatctttgctctacgattttaagataatcctattatgaagatatttcctactacaagcatcaagcaactggatgcagataccatagagaatgaaccgattgcctccattgacttgatggaacgtgcctcacgcgcattggcccgtgccattgccgagcgttgggagccggacacgccgctcaccgtttttgccggaccggggaacaacggtggcgatgcgcttgccctggcgcgactgctggccgggaagggctaccggctcgaggtgtatctcttcaatacgaaagggacgctttcgccggactgcgagacgaacaaggagcggctggccgacgtgccgggcgtggacttccacgaagtgaccactcagtttgtgcctcctgtgctgacggcggaccatgtggtgatagacggcctcttcggcagcggtctgaacaaggctctgagcggcggttttgcagccgtagtgaagtacatcaatgcttcgcccgccacggtggtgtccatcgatatcccatcgggactgatgggtgaggacaacacctacaacgtacatacgaatatcgtccgtgcccatctgacactgagcctgcaattgccgaaactggcatttctctttgccgagaacgagccgtatgtgggcgaatggcagttactggacatcgggctcagtgaggatgccattcatgatatggaaacggacttctgcctgctggagcatgaagatgtgtctgccctgctgaagccgcgcagccggtttgcccataaggggaattttggccgcgcactgctgatagccggttcgcaggggatggcgggagcttcggtgctggctgcgcgtgcgtgcctgcgttcgggtgtggggctgctgacggtacatgtgccgttctgcaacaacttcattgtgcagacttccgtgcccgaagccatgacggagctggacatcagcgacacctgctttgccgccgctactgatacggacgattatcaggccgtggcgataggtccgggactgggaaaggcggcagagaccgaggcggctctgctggagcagatagagatatgccagactccgatggtggtggatgctgatgccctgaacttgctgggcgagaagcgtaactatatagggcgtctgcccaaagggagtattctgactccgcaccccaaggaactggagcgtcttgtaggcaaatgccagaattcgtacgaacgcttgatgaaggctcgcgagctggcgaagagcgccggagtgcatatcatcttgaaaggcgcttattctgccattgtcactcctgccgggaaatgttttttcaaccctaccggcaatccgggtatggcaacgggaggcagcggtgatgtgctgacgggagtggtgcttgccttgcttgcccaaggctatgagccggagaaggctgcctgcctggccacgtatgtgcacggactggcgggagatgttgcctgcaagaagcagggggcagtggggatgacggtgggggatatagttgcctgcctgccgctagcgtggaagatgctggaagaataaggagagaagtgtaatttggatggcttgtcatgtcaacagaaataagatattttgaaaacagaaaagattggcggaagtggctggctgacaatttcgatactgccgatggagtctggtttgtgtttcctactaaatcttcaagcgagaaaagtattgtatataatgacgctgttgaagaggccctttgtttcgggtggattgacagcacgataaagtcacttgacaaagaacataaaattcagcgtttcacgcccaggaatcctaaaagtacctattcgcaagccaacaaagaaaggttgaaatggttactggagcataaaatgatacatcttgaatttgaggataaaatacgaactgtcttgtcggttccttttgtttttccaaatgatataatcgacagattgaaagaggatgaaagaatatggaagaattatcagagtttctctgacccctataaacgtatccgaatcgcatacattgaagcggcgaggaaacgaccggaagaatttgaaaggcgattaaataactttatctgtaaaacgaaagagaacaaaataataatagggtttggcgggattgaaaaatactattaacgctaattcttttccgcttatttctctcttgtcgtaatgtggaagcatccttgcttcaactcgtacttgatgtagcatttatcggctttccgcaggtcacggagcacttccgaaagaaccagttttaaggtatctgcgctgacatcctgcaaaggacgtccatcctcgtcttctattttctgaaagcgcttccaactgacatcgaatgtcgttccgtaaaaatgtgccgagtttggagaagcattgccgttacggcggcgcaggcgttttacgtcgtcttgggtgcggagtacggaagtcacaattatcttgtttggattcagccccttggcggtcagtgaatcaaggaagttgtgtccgatggtgtccagcaggctggcggcgcccggaatgagataagggatggaatgcgtcagtgaatccacggcatagagctcgtttgtcgtgataggttgcagttgctctctcatcttttctgcttcctcgcgggatgaaagtacacgtatgccgatggcttgggctacattgagatgtttctcattcaagtctccgaacgagcgcttgtagctgacaacaccccgaatgttgcgcggttcgttcaacttgagcgacatgtccttcttcttgcagccggcaaaggtgaatgttgcggcagctgcgacaattatcagtataggtaggattctggaagaatatctcatcttataaatgtactatgtctgtgaaaaatctgcgttaatctgtgtaatctgtggtgaaaaccttgcaaagataattcaaaccttcttaagtttgcactatctttgcacacaaaaaagaccgtgcaacgatattttatatacctggcttatgatggcaccgcttatcacggctggcaaatccagccgaatggagcgagtgtgcaggagtgtttgatgaaggcgctgagtaccttgctgcgtcgcgaggtggaagtcgtgggagcggggcgtaccgatgccggggtgcatgcctcactgatgatagctcactttgacagtgattctcctctggacactgtttttatgacggataagctgaatcgtctgcttcctcccgatatttccgtataccgcttgcgggccgtgaagcccgatgcacatgcccgctttgatgctacggcgcggatgtataagtattacgtcactactgccaagatgcctttcaatcgtcaataccgttgccgtctgttccaaacgccggactttgagcggatgaatgaggctgcccaaaccttgtttgactatacggactttaccagcttcagcaaactccataccgatgtcaaaaccaataattgcaagattatgcatgccgcctggacgcaagtggacgatgtgacctgggtgttcaccatccaggccgaccggttcctgcggaacatggtacgtgccattgtcggcactctgctcgaagtggggcgtggaaaactttccgttgaaggtttccgacgcgtcgtcgaacagaaggaccgttgccaggcaggaacttccgttcccggaaatgcattgtttctggtggacgtagcctatccggaaactacttttttagaataaaagagggatgtactacaaaaacgtagccccctccctttaatttttaattcttaatttttaattgactctatgtggttattacttgctttcctctctgctgccttattgggattttacgatgtcttcaagaagaagtcgcttcgtgacaatgccgtactgccggtgcttttcctgaacacgctgttctcaagccttatatttcttcctttcattctggtatctgcctttgcgccgtcggtgttgggaggtacgatgtttgatgttcccgtggtggggtgggaggtacataagttcattattgtcaagtcgtttatcgtgctttcttcctggatattcggttatttcgggatgaagcatctgccgctgaccatcgtgggaccgattaatgcgacgcgtcccgtaatggtgcttgtaggtgccatgcttgtgtttggcgaacgcttgaacctttatcaatggattggcgtgctgcttgccatagtgtccttcttcatgctgagccgttcgggcaagaaagagggaatcgacttcaagcataacaaatggattcttttcatcgtgctggctgccgttgccggagctgtcagcgggctgtatgacaaatatctgatgaagcagctcaacccgatgctggtgcagtcgtggtataatgtctaccaagtctttatcatgtgccccatcatcctgctgttgtggtaccccaagcgaaaagaaagtaccccgtttcgttgggactggaccattatctgtatctccattttcctttgtgcggcagactttgtctatttttatgccctgagctatgaggactccatgatttccatcgtttcgatggtgcgtcgtggaagcgttgttgtttccttccttttcggtgcgcttttcttccgtgaaaagaatttaaaaagcaaggctgtcgacctcattttggtgttgattggaatgttcttcctatatttggggagtaaataaacaagagatatatggcagaagacctatatataaatgctggtagcaagacagagaaatatcgcgctttgcttcctcaactgaaaaatctgctggcaggtgaagatgacttgatagccaatctggcgaatgtttcggcggcgctgaaagagactttccatttcttttgggtaggcttctatttggtgaagggtgaagaattggtgttaggacctttccagggaccgatagcttgtacgcgcatcaggaaaggccgcggtgtttgcggcgcggcatgggatagagccgagacgttggttgtgcccgatgtggatgcatttcccggacatatagcctgtagctcgctgtcgcgttcggagatcgtggttccgctgaagcgtgaggacggtgaagtgtggggagtattggatattgacagtgacgatttgggcggttttgatgaaacagatgcccgtttccttgaagaaatgattaaaatgttatgataagaaaactgagtgcttttttgattttggctttcatcggatgggggtatttgcaggcccaggaagccaagacgtgttttaagaatatgccggattctatatgtccgttgcttagcgccgtgaaccgtgcggattttatagactttctggaaagtaagatgaaagctgaggtgaccaacagctttggtggtaaatcggaaatgacggaactttctccagactatatacatgtgaagatgacgccccagagttcatggcagatgaagctcttgtctattaacgacagtacgaaggtgatttgtgtggttgctacggtttgtgctccggcttgcgacagccatgtcaagttctatacgacagactggaaggagctggttgcttcgtcctacctgccggcattgcccgttctggatgattttatcgctgaggccgcggatacggtggatgtctatgagtatcaggatgcccgtcgccaggccgacatgctgctgatgaaagcggacctttctgcgaaggatgccacgttggcattcacttttaccacgaccgattacatgggtaaagaagcggcggagaaactgaaaccgtttgtccgccgtcctattgtttatacttggaatcaagggaagttcgagaaatcctctacttcactttgattctgtcgaatccctctccatagactccgatgactgcactttgtgatacaaaggcattggggtctatgtcttttatgagccggaaaatgatggtggactcccgcttcttggccagcacgaacagcatttttatctcttttcccgtatagaagcccgaggcgttgatgaccgttgcacctctgtgaggatatacctggatgtgcttggctatctcctcatatttatcgctgataataaagaattgtacggactggcgggcactgttcaccacttggtcgagcacgaagctgcatatgtatagagtaacgtagccatacaccaccttttcccaatcttttagaacaaagtaactggacgagatgatgataaggtcacatatcaacatgactctgcccagcgtgatgtcgcggtacttgttgattacggcggcaatgatgtccgtgccgccagtactgccgttgttggaaaaggcgatgccgatgccgctaccgcagaaggaggcaccgatgacacaagccatgaaaggctggtcgtgcaggaggacaacaccctcggtcagtttctggataatggaaaggaaaaaggtcagggtgaatacggcaaagattgtctttacgctgaacttccatcccaacacacgtagggcaagcaatagaagcagaaaattgatggcgaagtacgtatattggacgggaaatccagtggcaaaatatacgatggatgcaatgcccggtacgccaccggtagtaatatcgttgggaagcaggaagactgtccagccgataccgtacaagaccatgcctaaggcaatcatcagataatcccgcagttcgcgcatagtgttctgtcgggagggaatatttactattgttttcattataattttatgtggttgtgaaaatgcggggacaaagatactgcttatttgggatataatgttgaaaaaaaaatgcagatttttgcaaccaaacttcatctttctgcgtctaataaataaaaagaggagattatgaatatgaaaatgaatttttccatgaacgagattcgtcttaaagtagaagagtatataaagaaaggtggccgggcagctggtcgtccagtactgacggcttattatgtgatgactgcagactctactccggagagtgaaaggacaaatatcatgattgctttggtggccattgtatttcctaccagtatagaagaccttttgggacaagtctttatggtagggaagggatttgccgcagtttatgcttataagaaagtgaagaaatacatcactccacagataaaagacaaggttgaagctaaattggatgagtggttccatgagaatgtgacggaggtggtggagccactttatctggaatagcagttcgccacggagattatgctgatttgtacggattgaattcatatcgcgtatttgtatctgtgcgaatcagcataatctccgtgacggactgtttattgttttttgctcaagaagcgtttagccagatatttccgtaccggttcatcatagaatttcaggcatagataggctaacaatatattccatgcatagacgcataaggcaacctgccaagtctgctccaacgtgaagagctggttcttgatgagccatgcatagaacaagtacataaatggataatgtatcacatagacaggataggatatatctcccaggaacttgcatatctgggtcgatttcttatccgttgtggtaccggaagctcctaaccagacaagaatcggaaaagctatgatgacacagaacacttcataaatgccatttgtacagaccggcgccgtaccttccagatagggcactgagaacaaggtaatcaatgcaatggtgcatatccagaaagcgcctttcaccttaatgggcttgaagttgcgcgataaaagcatacccatggagaaagggaaaagcatcctcaataatcctccgataaagtttattccgtccagtgtccaacctactcccatattgccatatccggagacatcgaagatggcgaatgatgccaatgctattcccagcaatattgtcagtacggtcagtgctttgtttgacaatcgtcggatgaacaaggcataaaggatgttgcctatatactcaaagaacaatgaccagcaaggaccattcaagggaaacatttcgccattaccacggacttcatagcctgctcccggcattgcgggaataaagaatatggagcagagaagggacagcataatcattgatagggcaatatgtgttccgtcccattgtatgcatccttgaatgcagaaggtgatggcgcccaaaacagcgcccataattaccatcggatgaagacgtatcagacgtcgcttgaaaaaactcttcatggtgaggctcctgccccaacggtcgtcataagcatacccgataacgaatcccgatagtataaagaagaaatctacagctaaatagccgtggttgaaggtttcgataatgccaccaccggcaaaagcgtagccttcgaatatatgataccatataaccatcaaggctgctacgccacggagcccgtcgagaaggtcataatgtgctttggtgtctgaaaaggcagaagatgaaatgtacgacatctgttttttctgttgtttggttaatgttttcggatgtcaaagatacgccatgcgaagcgaagttcttttgcttaaaagcaaaaaagaacggtaatcttctatttttttgcgcgtacccggctgagagtatagatggaaatacccaggaaagctgccacatattttagcttcacccgatttatcagtccggggtaacggcggttaaattgttcataccgctcttggggaggcagttggagtctttccacaaacatatgactgagctccttgtttacgttctgatgcagtattctgccccagttggctatatcaatatatgtttcgtagagagcatttaacttgtctatgtggatagtatagattttgcagtccgaaagagtttcaatgctttctaccgacggctgctgatagtacagtgaatccattccgaaggttacatcaccttcctggctgaaccaagtggtggtatcttgtccgtcgtgatgaaatacggaacgggtgaccccttcctcaatgaaataaatcaaacggtctgttactcccgcttgtactatataagttcctttaggatagtatcttacctgcatattcgtcaaaagtgcctgaagtgcttcttcggaaaccggataaatctgcctgattttatgaatgatgttgttcattggaggggaactttttattcgtttacaaacttacataattttattaactaaaacagaactttgatatacaaatgtgtgcgttgcctcataagcgtttatggtataatggaatttttcttgtaaaagagatgtttgttctttgaatattgtatctttgtagaaaacggtagcctatgaataaaatattggtaacattattggctctaatcggaggcagctgcatttcattcgcacagatggagaccggaagaatttccgatacagctgaggatacattgagaatagaaaatgaaattgtcgctgttgataccggattttaccagtcagtagtccgctatgatacggtgcgctataatttgaaaatgcagagtgtttacaaaaaggcttttcaactaaagaatgatgtttttgtggaaaagatgaaagagccgtggttagatgatattctcagaaatatcttatttaaataaccatgaatttgtgctttgcggcattcggttgacttccaggtttaactcactcggttaaaccacactaaattcagcattctctaaaaacaaaaatcagatagaaatcttgcgataactatctgattttcttaagagcggaagacggggctcaaacccgcgaccctcagcttggaaggctctttgataatactattcaattatttgattgttagtctgttaattacttctttaaaagtcaatagaacaactattgaccaacattggtaaggtttatacaataccaatagcagcatttagtaatgctaagtttcttgtttctttctcataacaatttctattatttttaaatatcacatttgctccagaaggtagagcctaaaatagcatagtcctcttcaacactcttatcaacaaagaatagttcagaataaggatgtccttcatgctcaaagttgaactttatagctttacaccttctgagtttattatcactacacttaaccaccttacaacccacttccctatatacacctttgaaatgataaagtttcaaaggttctggaagaataggaaaagcatcttcactttccctcatcagcttctcaacagccatttggttagcttgatattcttcttctattgcaggatactcctctttaaagaatttcaaaaaatcagggttaataaggttatgcttcattttgttgtcaagaagaaatgtaaagcctaagccttttacttgaataaatacttctatttcatcttttcttgtagtcatatccatacagctttttgaacttatcctttgcttgttcttcaactatatcatctggaataaactctgcatattcatctgctgattttatctgcctaactattttgtcaaagtgataatcatccctgagctgttgattttccctctcatcttcctcattaagattaccagtgagatgtcttatcttatagtcttgttgctctatggttttcctattagatttcatttctgcatatagaagtattgcagctcctacggcaagtattgctatgccctcaatcattacattttacattataagtttcaaaatctataatccatttattctctataaggaattgtactccaagtactccatgaatctgtattccagtttcatcctgcacttgttttatagcctcagaagcatccaaaactgaaaaagtggaagtataatctctcccttcaaaattgaatgtagcttcaatgataggggtttctttgtagtgtccctctatccccattgttctatatgttccttcaagtagcttaaactcactcttaaaatgttcatatacaaagtcaaatagggtgttatgagtagcaccagtatcaatcaagaaacaaaggttatttgtttttccagatgtcagtatcagtggtaaacctgctttttgcagaccaaatgttagtggaaattccataattatgtaagcattcgaagaaatgcaccttttacactttgaggtttggttgtagctttgcggcagtgaatacaatcaaacctcaattattatgaacagacaagaatttgaagaattagaattgcaggtgcaacaaagcgagctgccgttgaagtcgtaccttcaacagataggtgtaagttattcaacctatcactactggcgtagaaaatgttccgttgacaggagcagtatcaaacacgagttggctcctatcagttttaaacaggcatttacggagtcttcccaagaagaacaattgccgcatggtgttgcgctgctgtttcccaatggacttcgtgcccacttcgggagcggttctgaagatttgctgaaggaaatatttacccaaagtcttcgagacggtcatgtttaacctgaacgacacgatgcgctacttcctgtgtcctggcaggacagatatgcgcaagggtatcagttcgctatgcggagtggtacatgagaaaatgaacagtgaagtgaggaacggtgatgtcttcatcttcatcggttccagccgcagactaatgaaactccttcatgccgaagacggaggtatggtaatgtatgtaaaacgtctggaggccggtcgcttcaagctgccggagtatgatcccaaatcaaacagctatcccatggagtggcgcgatctggtgatgatggttgaaggaatacaggaaaacccggaacagaggctccggcggttaagagccgaacgtaaggaataccatgtataacatgttttttgcgtgagtaaactttggatattgttgcataattcactgttaattagtatatttacatcattaaaagaagtatagacaatggaagaaaaagaaattttactcaagacgatagaagggctgaatgcctctatagcctcattgtctactactaataagaatcaatccgaacagataaaaaatctgcaggaacgtatcaaggagttgacggctcaggtcgcatggctgaaccgtcagctctttggtcgtaaatcagagaaacttcgcgtatatgatcctaatatgccagacctctttgccgacgagttttccggactccggcagcaggcggaagaaaagcgggacgaggctgtggaaaagattgagaaggaatcggtggaagacgtaaaacgaaatcgtcagaaccgcaaaatgatagaggacttgcccgtattggaaaccgatacaatagaaccgaaaggcgtagacttgtctttataccgtagaataggcgaagagataacaaaagtcgtcaaacacaagccgggaatgctttacgtcaaggtgatcatccgtcccaaatatgctctcaaggatagtaccctgcttcctccagccggacagaaaggcgtagagatagctcccatgccgctgatgccggtcgacaagtgcattgctgacaccagcctgcttaccgagatactgcttcagaagtatgaatatcatgtcccgttctaccgtcagatacagcaataccgccatcttggaatgaaaggccttaccgaaagtacactggacggctggttcaagaaaaccgtggaactgcttaagcctctgtatgaagaactcaaatgggaagtcttctcctgtgactatgtacaggcggatgaaactacagttccggtcattaacagagaaaaacacagagccgacaaggaatatctctggatggtaagatcagtcatggagaaactggtcatcttccattacgacgggggatcacgggccggagcggtcatcgaatccctggcaaatcaatataacttcaagggatatcttcaatgtgacggttttgcaggttatgaaacagccttcaagaccaaccccgacgtgcggctactcaactgcctggtgcatatacgccgtcattttgagcaggctttggatgaaaacagggagatggcgcaacatgcactgactcagatacagcatgtctataaaatagaacgccagtgtgacgaagccggcctgtcatatgatgagcgcagacagacgcgtcaggaactgtccaggccaatcatggaggcaatgaaggtatggatggagacagaaggaattaaatacagtccaagttctttgacaggcaaggccataacatatgcctataccaaatgggataatattatgagatgtctggacgatggccgcctgtactgggacaacaatctggcggaaaatgtccaacggcccatcactctgagcagaaaaaattttcttttctgtggtaatcacgaagctgcggttaatatgtctgtcatatgttctctgctggccacatgtaaggcgcacggggtaaatcccagggtatacctgaacgatgttatcgcacaaatgccttatcacaaaaaggcaacccaagaagaacttttgaatctacttccacataaatggaagttgaaacatccggaatgtgtactgacaaggcaaaaggaggaatcttgtaactgatataaattgtaacatatgggttcaacaaaacaatagcggctgatactattaggttcatagtgacagtcgctattgttgtatataaaggtttaatacctgtagttggccgaatacttacataattatcacattatctatttgaatatgtttgatgatttatcaaggtctatttatataagattttgttatggtaatatatttaaagatagtatatcaaaacaatgtgtcctcttgtatatagaatgtaggatgtatcaaaaattactagtaaaattcatccatgcactaccattgccataaactccattttgctaattcattatagaatttcatgagataatgacacaataatatatctaatatatcatcataaatttttgaatagatttttatttatataatcaatctcataataaatagataccacatctttcaatgcatcactataaaaaccatatacaaaagcatattgctcattaacatatgctatgacataaaatgcttctgatgatgttttgaaagtaactctcttagcaaaaccatcatactcaactttcttttgatactgatacaatcgttcttggtcaaaatcatcttctttattactataacttgttcgtattatatagttgttatcagtagttttccatattcggattattgtatttttgtcattgggatgatgtgcagttactaataattgcttagtttgtgcaaaaatattaatgctaaaaaataacataaatacagtaataataagcttaatcattttcattgttctacttttttgtagtcatactacaaaaaagaaggtgtggtactttcctgctgagtccaaggtatcaccacaacacctacaatcacaaacaaggaaagcccacacctgatggtatgagcattcactcccttactgctgtgattgttagtcttcaaagtggtgattttaggacttcacaagtaagaagcaaacacttctttttctaatatgtcttgttaaacttctatttcattagcaatcatttgattgtttctgttgcaaagttaggactttccacaaataaacaatcatttgaaggctacttttaataggtctcaatccatattagtaccataggcatgagcttattctcttatctatcattaaggctcttgaagtggaaaagtaataataaccttcatatccaccagtggcaaatgtaccatttattctattacatatctctgattctcatgtcttttcaaaataaaagccccaattccatgctggaaccgaggcttacaacaataataaacacaatacaaaggctgttcacctttatctctctttagccattatacacatgaatatcaatccaatagtgatattcaaaatgccttttaccattatctccatgttataaccagttcaaataccttagtacccaactacagccagctactccagaaggaaaaacaagaaaaagatggaggacatttcatatccaatctttcttccaaactaccttttggagcttattttccagttctccattcagccaccacagaaaataccccttgctcacttacttcttatataaatataaccaagtaaatgtgaagtgtcgaatttttatttttattcctataaggtacattacagtttttttcgacactacagaatttcctaacataatggataaatgggagcagatactccagaaggaaataggaaatataagattattgtataaaccatgaatattcattttctccatacagagccttatttagcccttctgtaagctgtgtggcattgagtgacctatccaagaaattatctatatagctgcttttattggctccagtgagcaaattatatacattccacatagatatggcactctgattctcaggaagggcaaaattatcatcattataatatgatttggctacaagtcctatctgagtatctgtcatcagcatttgaggaagccttttcttctgttcaattgggagatattggtataatctgctctttcccaagaactgggcaaattggctttcagtcatataactatccttataagcactcatgtagtataggtgcttggctatattatattcttgaaatagcctcatcactgaactaaataaatcagcagtactcatcacctttaactcagacttgtaaccatcagttgagacacacatattacagcatactaagttcttaaagcctataaataccttgaatttttctactcctttcttgctgtataggttctcatggttatatgcccttactccaccaatagtaagattcaatctattgcccattatatcttcatggatagtgggaatctcaaaacagaacatcatcctctcatagtaaatggtcttgtctgattcaagtaaatccttcactggtttatgaatagcttcgggtgttctgcctttaatgacatggcttactctgattgcaggttcttcaatcctctcattgggaaatatctgattggcagcttcccaaacagtttcaataaatgaagggtgactgatagttatctcattatccttactgaatactggcactacacattcttcccttagatgctgtatagtgacttctttggtgttggcttctataaaaggtaatcttttgttttcccttctggagctgataatttcagtctctatagtttcaactggggtttcaatctcaaactttggttgattgaatgtttgcatcaacatattagttctgtgtactggcattaactgcattgcttccataatgtataaaattaggattatagttgataataggtttattgctctcttcttgtaactgcatcttcttctgcatgaaatctgatgtaagttgttgataccattctgggtattggtgataaatggaggtaagttcttcaatggttttagcctgatttattttctgccttatcatatccaagtttactccattattacaccaatccagtattatttgcccagtagtgggtgtaatagtaaagtctggtttacccatgaatagacttgttctatcctttgatgcaatggcttgatgcttcatattaatatcaaggactatggtaaattcatagtctattccatccctcatgacagcctttaagcccactttctcaggaattatcttgccatttttttcactaagaacataatcctgcttacacctcatggtacaaataacatggcttggagattgtagaatcttctgcatgaaggcattaattcttggtgtaatcttctgccaattagtgaatgaattgccttgtaggttagcatggtattccagaaggttatcccaacattgagaaatgctgtctatgattatcacctccattttagcctcttcacatatctttatagcttcaatataagtctcaggtgtgaagttgtcttgaaggggtaatacattgtaattacctaaactggcatacaaatcagcactcccattttcactatcaataatggcaattttggtccagtcatttgtcagaccataggctaataatagtgcagaataggtctttcctgaacctgcacagccttgtagggcaagctttatcttagcctgcttctttgatgatactcttaaatttaacatgactatattctattaatgattaactacttagaaaaaaaggcagtcagactattaatccaactgcccttctggagcttttttattagtttctatagagttgccaatgtagtagcccctccttcccctttctgatgtaacagaaggaatatatctccagtttcagcagagcatacttctgaaatgactggtattgtcagctctccagtctccaccttccttgaacaagctccagtttcaaagccatagacaaagaaacacttgccagtgtgttcatttcttttcacttcaatcttttccacattgtgctgtgctttaaattcagctacactcattgtttttaagaacttcaagtttctttccataattgtaaatttattattgttgtaggggggggaccatccccaccctgaatgatggggtaggtgattggttggagtgcataacactcatggctccagaagagaaaaaaataaaaaaataattttgaatagttttttcaagtcagtaaaaacagttatacattactacttataaacatagtaatactgttgcttatctttgtaaacatacatacttttaggaacatcttcacttatggctgccatttctaaccaattttcatagtttatatgtcctaaccaagatacacataacatatagtcatgaggataatcttcactttctggattctcaggaacatcttcaagttttttcaaataatccttatttatgagtgattttcttattttataaaaggtgctttttttcactttaattttttcctcccaaaatttccatgacatagtaaggttgaaagaattattcacagtattacaatatagtgcaatgatgaatcctttctcttctgaagttaaatctgtattttctaatacttccttctgaattattctaaaattagtttgtgggtgtggcagaaaatatctttttcttttaagtccttcttgagtaaagaactctattctatcgcagaaaccacttttttctaaccttggcataaagttatcttttatataactaaaggattgttttgtaatatctgctatttggagataggttgagtcagttgaatagtttgagttggctgtaaagtataagcctattaaagtatataaatcatttggagaaaacaaactactaattctattgggtattacagtataatttttcatatcttattttcatgagtccatattttatgtgatactataatacctaccttaatcttttgtattatagtatcgcataaaatatagacaattgtaaatccagttttgctaaagataaatatgagaagaaaacaatctctcctttaaggaatatataaagatatgaaaaaatattgacttacacaaattatttaacagtttattatgttgataatcaggatttaaggattaaaaaatcttaataaattattttcttctggagcaattctatccttatgctcttttaattgtagaggattttcccctctaataacatattgattccttggtctatcagtcttatacatgcttttaaagaggcttatatactttctgggcattagtaccttgtgcagatgatatttgactataggaactaatatagcttgtatttcaggggaagataatgtttgatttacagaaaaagactcccttatagcttttttgaaagggtgttcttctgctaaagcccaatacattacagcattattgagatttttaaaggctacatcattgtcagttctaatctcccaaagttggtttaataggctatccaaatcaacatacttatatagtctaccaaatctctcaagaaatattctcttatttcttttactctgcctaatacatgtctttaaagtattgtcatttaaactacctattgcagccaatgtattaatttcagtaatagcctcttgtatgtaactatctgcaagttctccttgcatggctttgttttcatcttcaagagccatttgttgctggcttatatcataatttatagagttgtattgagctatgttggcacatttatctaaagcttctttcatcttctcaggtaggaaatatagtcctctatataactccattctctcaactaaataatctatattcagataggcaggcacatactcaccacatatgtttctcctaattaaatttataggttcatcgtaagcattcgaagaaatgcaccttttacactttgaggtttggttgtagctttgcggcagtgaatacaatcaaacctcaattattatgaacagacaagaatttgaagaattagaattgcaggtgcaacaaagcgagctgccgttgaagtcgtaccttcaacagataggtgtaagttattcaacctatcactactggcgtagaaaatgttccgttgacaggagcagtatcaaacacgagttggctcctatcagttttaaacaggcatttacggagtcttcccaagaagaacaattgccgcatggtgttgcgctgctgtttcccaatggacttcgtgcccacttcgggagcggttctgaagatttgctgaaggaaatatttacccaaagtcttcgagacggtcatgtttaacctgaacgacacgatgcgctacttcctgtgtcctggcaggacagatatgcgcaagggtatcagttcgctatgcggagtggtacatgagaaaatgaacagtgaagtgaggaacggtgatgtcttcatcttcatcggttccagccgcagactaatgaaactccttcatgccgaagacggaggtatggtaatgtatgtaaaacgtctggaggccggtcgcttcaagctgccggagtatgatcccaaatcaaacagctatcccatggagtggcgcgatctggtgatgatggttgaaggaatacaggaaaacccggaacagaggctccggcggttaagagccgaacgtaaggaataccatgtataacatgttttttgcgtgagtaaactttggatattgttgcataattcactgttaattagtatatttacatcattaaaagaagtatagacaatggaagaaaaagaaattttactcaagacgatagaagggctgaatgcctctatagcctcattgtctactactaataagaatcaatccgaacagataaaaaatctgcaggaacgtatcaaggagttgacggctcaggtcgcatggctgaaccgtcagctctttggtcgtaaatcagagaaacttcgcgtatatgatcctaatatgccagacctctttgccgacgagttttccggactccggcagcaggcggaagaaaagcgggacgaggctgtggaaaagattgagaaggaatcggtggaagacgtaaaacgaaatcgtcagaaccgcaaaatgatagaggacttgcccgtattggaaaccgatacaatagaaccgaaaggcgtagacttgtctttataccgtagaataggcgaagagataacaaaagtcgtcaaacacaagccgggaatgctttacgtcaaggtgatcatccgtcccaaatatgctctcaaggatagtaccctgcttcctccagccggacagaaaggcgtagagatagctcccatgccgctgatgccggtcgacaagtgcattgctgacaccagcctgcttaccgagatactgcttcagaagtatgaatatcatgtcccgttctaccgtcagatacagcaataccgccatcttggaatgaaaggccttaccgaaagtacactggacggctggttcaagaaaaccgtggaactgcttaagcctctgtatgaagaactcaaatgggaagtcttctcctgtgactatgtacaggcggatgaaactacagttccggtcattaacagagaaaaacacagagccgacaaggaatatctctggatggtaagatcagtcatggagaaactggtcatcttccattacgacgggggatcacgggccggagcggtcatcgaatccctggcaaatcaatataacttcaagggatatcttcaatgtgacggttttgcaggttatgaaacagccttcaagaccaaccccgacgtgcggctactcaactgcctggtgcatatacgccgtcattttgagcaggctttggatgaaaacagggagatggcgcaacatgcactgactcagatacagcatgtctataaaatagaacgccagtgtgacgaagccggcctgtcatatgatgagcgcagacagacgcgtcaggaactgtccaggccaatcatggaggcaatgaaggtatggatggagacagaaggaattaaatacagtccaagttctttgacaggcaaggccataacatatgcctataccaaatgggataatattatgagatgtctggacgatggccgcctgtactgggacaacaatctggcggaaaatgtccaacggcccatcactctgagcagaaaaaattttcttttctgtggtaatcacgaagctgcggttaatatgtctgtcatatgttctctgctggccacatgtaaggcgcacggggtaaatcccagggtatacctgaacgatgttatcgcacaaatgccttatcacaaaaaggcaacccaagaagaacttttgaatctacttccacataaatggaagttgaaacatccggaatgtgtactgacaaggcaaaaggaggaatcttgtaactgatataaattgtaacatatgggttcaacaaaacaatagcggctgatactattaggttcatagtgacagtcgctattgttgtatataaaggtttaatacctgtagttggccgaatacttacggttcatcattgcttatcctctcttgtgctttatcctttatagcctcttttacaatagagaataggtttgtaagtgtatagtctccttggctaatgtcatcagcagcagtaataagccttaaaactttattagcttttcttacaagagaatttggataggttctcatatcttctaccaatgcataatctttggtattataaacaatagtgtcacttagtatcttatactcacctctacatcttccatatatttgtgtcattctatctaaggttaacatagaatagtctcttctggagtctgatactgttattagatgataattgtctgatatgtctattccagtaaagtagcaacaagtggcaaaattaattctatttggcaatacatcattactatctaatttggctgcataatattctcctgcttctttaatagatgcctcactacatagtattgcacattcctttttcacttcttcttcaagagaagatatgatattttgaatctgtagaatggagttatatgcaatgaatattttctcatttgggtgagatttaatctcatttatcactacttggataatgttattggtatgaagtagtttaatatttcttttcttttcccattgccatgaaataggaaatagacattccttctttaaaagggaattggtaaactctttcatagtagctgtaaccatgcacctattcttgggagggaacaacagataataatcaatcacatcttccagatgaggtctgtagttactatcagattgaaggacatctatttcatcaattattagaaagtagtccttataattctcttcttttattaatttcagtaacctacctaaactatctgctactaccaacagcttcttatatccttccttctggagatactctattatctcttggtctgttgtcctttccttttcatcctttatttcacttcctatatataaagttttggggtgctttttacatttggagaaagccagtgcttttgtaggaaggactataattgaatttctatttgagtttatttcaagggtagtagcacctactccaggaatctgtttgtttactatgccatgtggcatcttatcaatgtaaaaagatagattaaagttacattgaacctcttcatactttgaaaaatctccatataataatccttcaagactatcaattcttgtatctggtgatatttctttgatttcttcggaatttccatctattgaatatacaatctgtggagcatcatataaatctccataagtattatacaatggggtagtattttccatatctcacttagtttaagtttataataaaataacaaagtgagcaaaaatagtaaagaatctccataatccaataaaccatagagattcttttaaacctacttacttctggagaccactgccaaacacatatttaagaactttagaattagcttcattctcaatcttaaagtctctttcaatgtatatatctgtgactttcattgcttcatctatatggttgagggctgaatggactgtgtatttgtctatgcctactttgttgactgctaaagtagcccatgagtgtcttgctgcatagtactccaaatcatctattttcaaaagttttccaatctctttgagtcctatatttatagccttattgaagttgccagcagttgaataagtatgatagaaattaaatattctattttttgtttggtcttggtatttttccattagtggttgaagaatagggggaactataactttcattttggctttatctaatcttctgtctttggttttacttctgtagtaggtgattgcttttccttccagtgtagagcaactgtataagtctattgagttcattcccatcaggcagaaagatataatgaagcaatctttggctaaattatatgggcatttcttctcttttcctgtgttgttgtattgataaggtaattcccatatctttttgatggcttctgctggtatggctctctttcttgtagcctcttgcttaggtatttctaagttatcaaaaggtgaattgggcactaagatgatatttctatcatagtcattatatctttttttgacttcattgtatagatgtctgaggcatccaatatataaagagagcattctgttggaaggtattcgttttccatgtttctttaattcctcaattctttgggctctttttaattgtagatagttcatgaaatcttttaatagctttttagttatttggtctgtatccaagtgttcttttccaagataagtgatgaaagcattaatagatgtctggtagttggcttttccttttaattgagtagtttccaaccactcttttgagaactgaatgaaatctatggtagtctttctttcatttttaaccttgatgcactctattatatcatttaagctgtaattagctgtttccaatgggagggaagcacataattcttgatattgcctaacaatattatttgcttccttaataaacttgggattctttattttgaatgccttggtgaggtcttccttccttacatagatagaagtaggcagtcttttgacttctctcttataagtcattctgattttgacattatacgtaccatcactcttttgtttgccttttaatacttcggctttgattgttatcatatctattgtttttttgggaacaacaatagaccaacaatgatataatttatagtataataaaagggttctccaaagagtttgtataaaagaaaaaggattaataatctattgattatcaatcctttcttaagagcggaagacggggctcaaacccgcgaccctcagcttggaaggctaatgctctatcaactgagctacttccgcaattttttgtgggcaaagatggattcgaaccaccgaaggcgtaagccagcagatttacagtctgccccatttggccactctggtatttgccccttttgcacttaagattctatctcaattctctcattgagtaggtttgtttctcaattgcggtgcaaagatacgactatttttgtaaactccaagcaaaatctatcatttttattgcagtaattgcacattcgtctcctttattacctagtttgccaccggcgcggtcttctgcttgctccatagtattggtagtaattaatccgtaaattactggtacatcgccacttgcgtttaattgggtaattccttgggtagcacccatgcaaacatagtcaaaatgtggagtatctcctctgactacacaaccaattgcaataactgcatcgacttcactgtattcgataagttggttggcaccgaaagtcagttcaaaactgccgggtactgtttttaccaggatattttcatctttggctccatgtttttttaaggtgtctatggcaccttttaggagagcaccggtaatattataattccactcagatacaacgatgccgaatttcattttttccgcgctgggtacagaactgaaatcgtagtctgaaagattgtgataagctgttgccataaataaggaattaagaattaaaaattaataattgaaaattaaagggagaggggagataaaagaggcacggactacacggattcacggctattgtgtctttccgtgttttccgtgtaatccgtgcctgagatgtttttataataaggtatattacttcttcaacagtttggcttgttcgatatacttgtcaatatccattgcctgatatgaacggaagtatttatccttgatagtggtatacgcctgaattgcatcgtcatatttaccttgctttaccaggatttctccggcttgcagcaggtagatggggctgagggagttgttgtcggcttcgttggcggctttcagcagcatagaagcggctttgtccagttggccgagctgcgcatagcagttacccatagcacctttcatggcaggagctaccatttggtcgtctccgtcaaagctgtccaatgctttcactgcttcgtcatatttgccgaggtgtgcatagcagagacccatataggcttttgcaagattggctgcttttgtgccgctgtattcgtctgccacttttacaaatccggcaaaaccgatgctgtcaccgttcagtgcttgtgcataagcgtctgcttcgaagtattcttgtcctttgaataaggcagcttgtgctttttcttcacgggggtctgcataaaggttcttgtacatcactacaccggcaatgatgatgattactgctactacagcgccgatgattgcttttttgttcttaatgaaaaaggcctccgattgtgtcagtgcatcctccacgtttaaggcttcattcgtctttttttgttctgccatttttatataatctttttgttattattcttatttatctatttcgacccgcaaaagtaagttttttatagctatcaacgaaatttagcagcatctttttttgtattgtatcagaaaacgctgaaattatttctacttttcaataagccgggcttcacctctgtgttaaaaataagcaggcttattttgtactgcttttggttttgcattatctttgtaaccgaactcatcgttactataatgatactgaaacgtatatctatactcaattataagaacttggagcaggtagagcttacattctcgcccaagttgaactgctttttcggacagaacggcatggggaaaacgaacctgctggatgcggtgtatttcttgtctttctgtaaaagtgccggtaatcccattgattcccagaatatccgccatgatgccgacttctttgttattcaagggttttatgaggctgccgatgggactcctgaagaaatctactgtggtatgaagaggcgccagaagaaacagttcaagcgaaacaagaaggagtatacgcgtttgtcagaccatatcggcttcctgcctttggtcatggtttcgcctgccgattcggagttgatagcaggaggcagtgatgaacgccgacgttttatggatgtggttatctcgcagtacgacaaagagtatctggatgctttgatacgatacaataaagctttggtgcagcggaataccttactgaagagtgaacagccggtggaggaagagctctttctggtttgggaggagatgatggcgcaagccggcgaagtggtgttccgcaaacgtgaggcctttatccgtgagtttattcctattttccagtctttctattcattcatttcgcaagatagggagaaggtgggattaagctatgattcccatgcccgcgatgcctctttgctggaagtactgaaggaaagccgtgtacgcgaccagattatgggctattcattgcgcggtgtgcacaaggacgagctgaatatgcttttgggagatttccccatcaaacgtgaaggatcgcagggacagaacaagacttatctggtagcgttgaagctggcacagtttgatttcctgaaacgtaccgggaccactgttcccttgttgttgctggacgatatctttgacaaactggatgcctcgcgtgtggagcaaatcatcaagttggtggcaggcgacagtttcggacagatttttataaccgataccaaccgcgaacacctggaccgtattctgcataaagtgggcagtgattataagatgttccgtgtggagcagggaatagttgctgagatgaaggaggaagaggcatgaagcgaaataatgccgaacagataggtgagcttatccgtcattacctcaggcaggaaagtctggagtctccgctgaatgaacggcggcttatcagtgcgtggcccgaagtgctgggccctactattgcctcctacacccgtgaactttatataaagaaccaggtactttatgtacacctcacttctgctgccctgcgccaggagctgatgatggggcgtgagttgctggtgcgcaacttgaaccgtcatgtgggggctcaggtcataacgaatatcatattcagatgagcatcctcagctcatctattctttcaatcttcagttctttcaattcctggactgcccggtcataatacatcggagtttccaaatccttgttgtcatgcgcatccagtccgatgatagctgtacagccttcattggcagcgattcgccagaattccgggcatgggtaggtggataagctgtgcgcttcattgtaggctacatagcctatattgtattccaacgggacattcaggcgtgcagcagtgcggcagatgtgccggctgatggtagtgcaatggtggtcgaatctcggataggaacgcatgaacaagtccggatgggcaaggcaagagaataatccgctttccataccttcgatggcgctctcttcgtaaaggtcgagcatatcgcggctgtccgtatgatggccgaagtaggggaacttttcatcagtgtggtagtgatggtttccgaagatgatatagtccagttggtacttcttgatttgttctttcagccaatggatatattgggggaagtattcacattcaagtcctattctgatgtctatccggtcgtggtatttctcacggagcgtcttaagactctccacgtagccgggaagctcttcggggagcatccgcatgtcggctacgtagtcagtacggtatttccagggagtgtggtccgaaaatccgagtatccggtaaccgcctttgatggcactgagcacatagtcttcatcatctccggtggcatgcatgcagcgtgtggtgtgcgtgtgataattagttttcattgcgttatgatttcatccatgcgtatatcaaacggttccgcaggaacttcttctacgagttgaaacgggaaacagatgccggctttgtaggctaatgggatgcggggcagaagccggtcgtagtaacctttaccgcgccccagacggttgccgttacggtcgaatgcgacaccgggaactactatgaagtcaatgtctgcatagtcggtaaatagctcgccggttggttcttcaatgccgtatgcgccgggtttcaggtcttccggtccggtgtacagccgcagttccaggtcgtcgcctacaactaccggaagcagtattcgcttttcgcggctccacttccggataaattcgtgtgtgtccacttcgtctttgagagagtgataaagcagtacggttgttgccgccctgaaagcaggatgtgcctcgagggcggcaagtatttcagcagactgacgcgtagtggaagagctgtgtcgggtcttcaacaaagctacctgcctgcgcagttcttttttcctttccatcatcttttgtatcctctatgattggtgtcgcttccggggctttggggaatgcctcgccacgttccagaatatccaatgccttcttgacggtagcatcgctctggttgatgtagcggatgtattgctcccttcccagtatgttatagataatgttgccgtaaaggcttctttccagtagcttgtaagacttgtgtataagcaggttgcgccgctttactcccttggagtctgcaaaacgcacaaactgttccacaataccctgatggcgaaggtacttcaacaagtcttcttcattgtcgtattcactcaatttcgtgcggttgcggtcggtatactggaagctgaattgcagaatcagtcccttgttgcttacttctatcaggtaagaagatactccggtggtgtcttgcggaacgaatacgtccggcataatgccaccgccgccgtatacgggtctgcccaagccggtagagtaacgtaggttttcgtccagtttgatactgtctttggagaagaactcgccgtgttcgtaacgggtaatccagtccatttcgtatttgctgtccttaccgttctcatagggacgctggatgcaacggcccgatggggtgtaatagcgggcaatggtcaggcggatggcggaaccgtcgctgaagtcgatgggttgctgtacgagtcccttgccgaaggaacggcgtcctacaatggtcccgcggtcattgtcctgaatggcgcccgcaaagatttcgctggccgaagcggagccttcattcaccaatactatcagcggcagcttctggcaactgccggtgccgttggcatattcctccatacggggatatttgcggccgtgggtatacactatcagctttccttccggcaggaattcgttcaccatgcgcgtggcggcttccatgtatcctccggtattgtcgcgcaggtcgataatcaggcctttgcatttctcgtggctcagttgggcaatcgcattcagcagctccacgtgtgtggtgcgtccgaatttgctgatttgtatatagccatagtcatcatcgagcatataggctgcatcaatggtgttttgcgggatgtcaccgcgtgtgatggtgaagtcgagcaactccttttccgtggcacgcttgacgcctaacttcacttggcttcctttcggacctttcaggttgcgcatagccttttcgtttgtcaggcctttgcctgcaaaaagactgtcgttgaccatcacaatgcggtcgcctgccatcaggcccactttctcggacggtccgccgggaatcacgctgtttacgtgtatcgtgtcttcctgaatggtgaactggatgcctataccgctgaagctgccttcaagttcggaattaacctcctccagtttctgtgcggggatgtaggtggagtgggggtcgagttccgccaatatctgtggcatggccttctctaccaaatcggtcatgttgacggtatccacatactggtcgtcaataacacgcagcaaggcattcagcttgttggacgagctattgatgattcccagtttattaccggcaaaatgcctggcataaaacgttccgataaggattcccgcgactacgctgattgcgatgataagcggcataaagcgggaagtattttttgtactcatgatgtttatttactattagactatttacaatttactatttggctgcacatgcaattttcaactttctattatccattatccattgaaataaataccacctcgatgcctgcccgtttcaaaagttcgataccatcttccaggcggtatttctcggagtagaccacccgtttgatgcctgcctggataatcagtttggcacattctatgcatggggaggcggtgacgtacatggtggcaccgttactgctgttgtttgaacgggctattttggtaatggcatttgcttcggcatggagcacgtatggtttggtgacgttgttctcatcttcgcacacattctcaaaaccggaaggagtaccgttgtagccgtcggagataatcatcttgtcttttacaatcagtgcaccgacctggcggcgttggcaatacgaattttcggcccaaatgcttgccatacgtatataacgcctgtccaatgcttcttgtttgtcttttgtagaatcgtccatcatatttatgttttatcgttgcggggtgaatcccatgactctggttgtcggtccgtctttaaaatagagggtcagtgaattggcatccccttcatacttgtacacattttgcagtccggagatgaatgtcttggccagtgcatcgctctctgcggaccccgtaacctttacgctgatgctgagcgagcctgaagctccgtcggctttccaagtgccgttgacgcttgagttgatgccttgtccgttgacggtggtgcccatcagttctccatccagttcggtaccttcaaaattgagggtgaaggtacttttctgattatatagcttgtccagactcttcttcatctcttcctcattgttgttccaaaggtttggatagaattgggcattgctgcctttattggtgagtcggctgagcttccatgtcttcccggtgaatatcccgacaacatcgtcttcattgtcgcaaccgcttaacaggggaagcaacgacaacatgagcagtatgcaacagatgttccttataagtctcttcatttctttattccatttctgattaataatgcgtcgattgtaggctcttgtccgcggaagcgtttatagagcgtcatcggatgttccgttccacctttggaaaggatattctctcggaaggaggcggcagtctcagggttgaagatgcccgtctgcttgaatagcgagaatgcatctgcatccagcacctctgcccacttataactatagtatccggcagaatatcctccggaaaagatatgggagaattgtgtgctcatgcaggcttctgccacagaaggcagaatctgtgctttttcccaagccttcttttcataggctttcacgtcaccttcaaacggggtgttacgtgtgtaccaagccatatcaagcaggccgaagctaacctggcggaggcaggcgtatgccgcgttgaagttggaggaatccacaatgcgctgtaccagttcgtccggtatcagttcaccggtttggtaatggcgggcaaacgtatgcaggaattccttttcgatagcgaagttctccatgaattgggaggggagttccacaaagtcccaatacacattggtcccactcaggcttccgtaggtggaattggcaaacataccatgcaggctgtgtccgaattcgtgcaggaaggtttctacttcaccgaaggtcaatagggcgggtttgtcttgtgtcggtttggtgaagttcatcacgatggatatgtggggacggctgttctcgccggtcttctcgtcaatccactgctccttgtagctggtcatccaggctcccgagcgcttgcctgcccgggggtggaagtcggtatagaacacagccaggaattttccgtctttgtcgaatacctcgtaggcgtccacatccttgtgataaacgggaatatttgggttcttcttgaaggtgatgccatacagtctggttgccaggctgaatacaccttccttcacgttgttcagctcaaagtaagggcggagcagctcatcgtcgatattgaacttccggtctttcagtttatgggaatagtacgcccagtcccacggcatcacgacgaagtcttctccttccgcttggcgtgccagggcttgcacttctgcatattcttgtttggcggtaggcgtgtaagcctccagcagttggtccagcagcttatacacggactcactgttttgtgccatgcgctcctggaggttgtattcggcgaagttgtcatagcctaggagttgggcaatctccatacggacattggccagtttctttacaatttccaggttattgctggcgttgtcatgcgtacacttcgtattgtaggccatatatagctcacggcgcaggtcacggctgtctgcgtaggtcaggaaagggccatagctgggagcctgcaaggtgaatacccagccttcgacgcctttttccccggctgtctctgcagcggcttctaccgcgctctcgggtagcccggccagttgtgacttgtcggtgatgacaagcttgtagtcgttcgtttctttcaggttgttttcactgaactgcagcgtcagcagactgagctctttgcataaagcccggtatttctccttggcttctccctggaggttggctccattgcgtacaaagccattgtaaatatcttccagcagcttgtgctgttccgggttcagcgtctctttgtcttgctgctcgtaaaccgctttgatgcgtgcaaacagctcttcgttcaggctgatgtcgttttcatgctcgctcatcataggcatgatttccttggccagttcctgcaggtcatcgttcgtttctgcgctgagcagattgccgaatacggtaccgacacggtggagcatttcgccggacttctcataggccagcactgtgttggcaaatgtcgggacttccggattgcggatgatggcatctatttccgcattctggcggcggatgccttcgtggatggcgggtacatagtctccggtcttaatcttgtcgaacgggacagtgccgtgtggcgtggagtatgtttcaaaaaaaggattttgagacgatatagtgttcataaagcaaagcaatattagagttagtataatcttcatcatcattaaagaagctgataaaaaacgtactagctgcaaaattgcaaaaaaaataggcgacttctgcagaagccacctattttttattattttctaactgtatattagcagttaactgatgccatgtgagcaatcaggtcaagaaccttgttagaataaccgatttcgttatcataccaagatacaaccttaacgaaagtatcagtcaaagcgataccagccttagcgtcgaagatagaagtgcgagtgtcacccaagaagtcagaagaaacaactgcatcttcagtgtaacccagaacacccttcaattcgccttcagaagcttccttcatggcagcgcagatttcagcgtaagtagcgggcttagccaagttaactgtcaagtcaactacagatacgtccaaagtcggaacacgcatagacataccagtcagtttaccgttcaatgccgggataactttacctacagccttagcagcaccggtagaagacgggataatgttgccagaagcagcacgaccacctctccagtctttcatagaaggaccgtcaactgtcttctgagtagcagttgtagagtgaacagtagtcatcaaaccgtcagtgataccccatttgtcgttcaataccttagcgataggagccaagcagttagtagtacaagaagcgttagatacgaattgagtacccttaacgtaagtcttttcgttaacaccgcaaacgaacatcggagtgtcgtccttagaaggagcagacattacaacatattttgcgccagcttcgatgtgagcttgagctttgtctttgctcaggaacaagccagtagattcaacaacgtattctgcctctacttcgttccatttcaagtcagccggatttttttctgcagtgatgcggatagcctgaccgttaacgatcaatttgctgttttcaacgtcagcttcgatagtaccgtcgaattgaccgtgcatagtgtcatacttcagcatgtaagccaagtagtctaccgggcaaaggtcgttgatacctacgatctgaatatcgtttctcttcattgcagcgcggaatacgaaacgtccgatacgtccgaatccattaatacctactttaatcattttgtttaaacttttaagggttttataatgtttaaaaataaactttcgcttactaattgcatttctttctgatttgcggtgcaaaagtaagaaaatgtttttatattcgtaaccaaaatcataattaaataattgaaaagatgggaaaaagttcatttttacaggaatttaaggcttttgccatgaagggcaatgtgatagacatggccgtcggtgtgattatcggtggggcatttggaaaaatcgtctcttccatcgtggcagatgtgattatgcctcctatcgggttactggtgggcggtgtcaactttacagacttgaagtgggtgctgaaacctgccgaaatggtggatgggaaagaggttgctgccgtgaccttgaattacggtaatttcttgcaggtcactttcgactttctgattatagcattctctatcttcatgtttataaagttgttgaccaaactgactgaaaagaagaaagaagaggcgcctgccgttcctccggctccccccgtaccgagcaaggaagaggtgctgctgaccgaaatccgtgacttgctgaaagaaaagtaatatcgaagcagaacttcataatgtggttaatgtgccggttggcatattaattacattggtacctttaactcttcccgacactgccggaaactgttcctttttgtgctaagcaataatcttaccacagctgtggtaagcaagttgcatagctgtggtaagaaaacaacacggctgtggtgagaatagcttttcgtatatttgtggatagtgtttgcctgaatttaaagctgtttttagtaaaaaagcgtttttctgtcacattatccctaataattcctttactttttctacttttgcaaatcatttattaaagtctatacggatttatatgcaagagaagattattattcttgatttcggttcgcaaaccacgcagctcataggccgccggttgcgcgaactgaatgtctattgcgagattgtaccttacaacaaatttccatacggagatgagagtgtaaaaggagttatcctttcgggtagccccttttctgtttatgataagagtgcattcaaggtagatttgagcgggattcgtgggaaatatcccattctgggtatctgctacggtgcacagtttatctcctacagcaacggtggacgggtggagccggcaggaacccgcgagtacggacgtgcccatctcggttctttcgattcggagaatgtccttttcaaaggggtaaggaagaatacccaagtatggatgagccacggagacacgattacagccattcccgacaatttcaagattatagcttctacggacaaggtagcgattgctgcttaccaggtgtccggcgaggaggtatggggagtgcagttccatccggaagtgtttcatagcgaggatggtacgcagatgctacgcaacttcgtggtagacgtctgcggttgcagtcaaagctggagcgccgcatcgtttgtagataccactgtggccgaactgaaggagcagcttggcaacgatcgcgttatcttgggactgagtggcggtgtagactcttcggtagccgccgtgttgctgcatcgtgccatcggtaagaacctgacctgcatctttgtagaccacggactgcttcgcaagaatgagttcaagaatgtgatgcacgactacgagtgtctggggttgaatgtgattggtgtggatgccagtgagaagttcttcaaggatttgaagggagtgaccgagcctgagcagaagcgtaaaatcatcggccgcgatttcatcgaagtcttcgatgccgaggcgcacaaaattaccgatgcccgttggttggcacaaggcaccatttatcccgaccgcatcgagagcttgaacattacgggcaagaccatcaaaagccatcacaacgtgggcggtctgcccgaggagatgaacctccgtctgtgcgagccgttgcagtggctgttcaaggacgaagtacgccgcgtaggacgcgaattgggaatgcccgaacatctgattactcgtcatccttttcctggcccgggactggctgtccgcattctgggggatataacacgagagaaagtacagaccttgcaggaagccgacgatattttcatccagggcttgcgtgattggaaagtgaaggatgccgccggcaacgagacatcgctctaccatcaggtctggcaggcgggcgtcattcttctgcccgtacagagtgtgggcgtgatgggtgacgaacgtacctatgaacgtgcggtggccttgcgtgctgttacttccaccgatgccatgacggccgactgggcgcatctgccctacgaatttctgggcaaggtgtccaacgacattattaataaagtgaaaggtgtgaaccgcgtaacctatgacatctcttcaaaaccgcccagcacaatagaatgggaataagaccgactgaaattattaacttaaaaacaatatagaagaatgaagcaggatatgattgtgattctggatttgggaagccatgagaacacagtgcttgccagagcgattcgtgcgttgggagtatatagcgaaatatacccgcacgatattaccgctgccgaactgaaggctttgccgaatgtgaaaggtatcatcatcaacggtggtcccaataatgtggttgatggggtatctatcgatgtattgcccgagatttacgaagcagggttccccgtgatggccgccggacacgacaaggcgttgtgtgaagtgaagctgccgcagtttacggatgatgtggaagccatcaaggatgctgtgaaatctttcgtattcgatacttgtaaggctgaggctaattggaacatgacgaatttcgtcaacgaccagatagaattgatacgccgtcaggtaggcgaccgtaaggtgctgctggcactgtccggtggtgtggatagctccgtggtggctgctttgctgctgaaagctatcggcgacaagctggtttgcgtacacgtgaaccacgggttgatgcgtaagggcgaatcggaagccgtggtggaaatctttggcaaggagctgaaggctaacttgatatacgtggatgccacagaccgtttcctctccaagcttgaaaacgtggccgaccccgaacagaagcgcaagattatcggcggagagtttatccgcgtctttgaggaagaagcccgtaagctggacggcatcgacttccttggacagggtaccatctatcccgacattgtagagagtggtacaaaaacagccaagatggtgaagtctcatcacaacgtaggcggtctgcccgaggatttgcaatttgaactggtggagccgttgcgccagttgttcaaggacgaagtacgtgcatgcggtgtagagcttggattgccgtacgagatggtttaccgtcaaccgttccccggtcccggattgggagtgcgttgtctgggagccattacccgcgaccgtttggaggctgtacgcgagtcggatgccattctgcgtgaggaattccaattggcaggcctggataagaaggtatggcagtatttcactgtggtgcccgatttcaaatctgtaggtgtacgcgacaatgcgcgctctttcgactggcccgtcattatccgtgccgtcaatacggtggatgctatgaccgctaccgtcgagccggtagactggcccatcctgatgaagattacagaccgtatcctcaaggaagtgaagaccgtcaaccgtgtttgctacgatatgtctccgaaacccaatgcgacaatcgagtgggagtgagactggccaatgataatgatagcctcaccttaaaaatggtggggctgtttttttatgacaaaaacaacaaagaatagaacaatgaaacttttatgtatgattgctgtctttttgtgcataccttgggtagcctctgacgcgcagaagcaggattggggaaatttgaaacgttatgcagaggcaaataaggaactggtacggaagggaaagcaaaaggaccgggtggtttttatgggcaactcaatcacagaaggatgggtggcaaatgatgccgctttctttgaaaaaaatggctatgtgggccgtggtataagtgggcagacttcttcccatttcctgctccgttttcgtgaggatgtcatcaagcttgctccggcgctggtcgtgataaatgcaggtaccaatgacgtagcggaaaatgcaggcgcttataatgaagaatacacttttggaaatatagtgtctatggttgagttggcacgggctaataagataaaggtgattttgacatctgtgttgcctgccgctgcttttggctggaattcttcggtgaaggatgctccgcaaaagataatgcagctgaatgccagaatacgggcatatgctaaggagaacaagattccttatgtcgactattacagtgagatggtagaggcggaagacggcaataacgccttgaaccccttgtatactaaggacggggtacaccccactctggaagggtataaagtgatggaatccttgataaagaaagtgatagacaaggtgttgtaggaaatctcggttcaggtggttataagagtttttctgcgttgggaatcatcatctcgcctctgtgcagttcgagcagacctttctcctgcatgctgttcagcgctctcgatactcccacgcgggtatcattgaccacctgggccagttcttccatttttattttcagcgttttcctgcctgccggacgttcgatgtgtgttaggataaagttgccgatacgtctttcaaggttgtcggtgttttctgcccaaaggcggttgctcagactttgcgcgcggttgctgatgatattcatgtaattcaggcggaatatatcatatttaaacaattcgctcatgacgaaagccttgcttatgctaacagtgtgggtctcagtttgggcggtataggtcgagacataggaggtgctcatcccgaatagggattgtggctcgatgacataaggcgcttgaaaatattccgtgaagctgtatgaggtattagcggatgaagtacatgaggagatttcacctttcaatacgaatatcagttgactgcatgtgtcaccggctttcacgataacttcgccggctttatgctttgtaaagttcagcttgacttttcctaggatattggtaaagtcttcttgtgcgagtccttgaaagagtggcagttgcaataatgtatcaaacattgtattcatgatgctttttcttcttgttttgaaacaaaagtagacattatcaaggtgtactgtaaactctttgcccctctttttgttttttttattgtttcttaaacgtgctgttgtcctcttctgccttgtggtccgaatcctctttttctgaatcctcttcttccgtgtcttcctcttcctcctctccggcaaacggatcaggccgttgtggtccgtatcccataaagcatatggcgcatagcgtgcctgctatggctccgctaaggtgtccttcccaagaagtggtggcctttgcaaattgtgggaacatattccataccaggccgccatataggaacgttatcaacagtgaaatggcgataagcggtacatgtttgcgcagtatgccgctgaagaacagaaagaaagccagtccgtatataatgccactggctccgatatgccatcccggtttccctataagaaaggtaagtgtaccgcatcctatccaaatggcaaagaaaatgtagggggctatatggcggtagaaatagaacagacaccacatcaggaaaaagagtggaatcgtattggcgagcagatgcttgaagctgctgtgcaccagtggatgtgcgaaaattccgaacataccccgctgttccatcggatatactcccagttgtgtgaagttccagtccatgcctatctccaaaaacttcaaaatgtataaaatgaatagcaggaataggggtataaccgccgccaatgccattctgcgtatatcatgcttcatatttcgtacagtgattgctatttttgtacaatactacggaatatttgacgaaaaccgaaaaaaaactgactttttattttgcctataagctttaattcgtatttttgggcatcgctacatggcttgtagcgcatataccgaaataattaacctttaaataatgcacaactatgagttatttacgatttgacaagaccctgatgattaatctgcaagaatctttgccaagggagatattgcggacgaataggtcgggagcctatcattgtacaacaattgtagattgtaacacacgcaaatatcacggtctgttggtgataccggtccccaaccttgatgatgaaaaccatgtgctgctgtcttctttggatgaaactgtaattcagcacggtgcggagttcaacctggggttgcataagtatcaagggaaccacttcagtcctaacggacacaagtacattcgagagttcgactgtgaaaatatccccacaactacctatcgtgtaggaggtgtcatccttcgtaaagaaaagattttcgtacatcatgaaaatcggattctgattcgttataccttggtcgatgcccattcggcaactacactcagattccgccctttcctggcattccgcagtgtgcgcgagtacacgcacgaaaatgcgcaggcaagccgcgactatcagttggtagagaatggcattaaaacctgcatgtatcctggttatccggagttgttcatgcagctcaacaaaaagaatgagttccacttccagcctgactggtatcgtggtattgagtatcctaaagaacaggaacgcggatatgacttcaatgaagacctttatgtgccgggatattttgaagttgatataaagaaaggggaaagcgttgtcttctccgccggtatttccgagatttccccccgcaagctgaagcagacttttgagtccgaggtggccgaccgcactccgcgtgacagcttttaccactgtctgaaaaactcggcgcaccagttccacaacaagcagggagaggagcattatgtgcttgcaggttatccttggttcaagtgccgtgcccgtgacttgttcatctccctgccgggtcttactttggccttaggcgaacaagatgaatttgaagacgtgatgaaaacagccgaaaaggctatccgtgaatttatcaatggagaaccttcttcctataagatatacgagatggagcatccggatgtgctactgtgggctgtctgggctttacagcagtatgctaaggagacttcgcgtgaaaattgccggcagatgtacggtaatctccttgaagagattgttgactatatccgtgaacgcaggcatggcaatctcttcctgcacgaaaatggattgttgtataccaatggtaccgagaaagcggttacctggatgaactctaccgccaatggccgtccggttattccgcgtacgggctatattgtggaagtgaatgcactgtggtacaatgccctgcgttttgtagccgatatggtgcgggagggaggcaatgaaattcttgctgatacactggacgctcaggcagaagttaccggaaagtctttcgtagacgtattccgcaatgagtatggctatctgtttgactatgtggatggttatatgatggattggagtgtacgtcccaacatgatatttactgttgcttttgactattctccgttggatagggcccagaaaaagcaggtactcgatattgtgacgaaagaactgttgactccgaagggtttgcgtacactgagccccaagagtggcggatacaatccgaattatgtaggtcctcagattcaaagagattatgcctatcatcagggtacggcatggccgtggctgatgggtttttacatggaagcatatctgcgtatctataaagtgagtggcgtgtcgtttgtagaaagatacctcatcggtatggaagatgaaatgacttcccattgtattggcgcattgcccgaactcttcgatggtaatcctccgtttgtaggaagaggggcggtgtcatttgccatgaatacggcagaaatcctgcgtatcttgaagttattgtctaagtataatttataaaaggaggaacgaagatgaaagttttaatgtttggatgggaatttcctcccaaaatatatggtggtcttgcggttgcttcttatggaataactaaaggattaagtttgcagggcgatgtggaaactactttctgcatgcccaagccgacgggtgaagaagaggacttcttgaagatagtaggcatgaaccaggtgcctatcgtgtggcgtgatgtcgattacaattatttgaagtcgaggctgacgcgcaacatgacgccggaagattattattctttccgcgaccatatctattcggatttctcttatatgcacgtcaatgacataggctgcatggactttgccggcggttatcccggcaacctgcacgaagagataaacaacttctcggtgattgccggagtagtggctcgccagcaggaatttgatattattcatgcccacgactggctgacgtatcctgccggagtgcatgccaagatggtgagcggaaagccgctctgcatccatgtgcatgctacggactttgaccgttcacgtggaaaagtcaatcctaccgtctattctatggagaagaacggtatggattatgccgactgcatcatgtgcgtgtccgaactgacccgtcgcacggttattgagcagtaccatcagaatcccaagaaggtgtttgccatgcacaatgccgtctatcctctctcgcaggaataccaggacattccacgtcccgaccattccaaagagaagattgtgacattccttggccgcatcaccatgcaaaagggaccggaatactttgtggaagctgcttcactggtattgcagcgtgcccgtaacatccgctttgttatggccggttcgggagatatgatggatgccatgattaatctggcagccgagcggggcatcgccgaccggttccatttcccgggcttcatgaagggaaagcaggtatatgaggtttataagaacagtgatgtattcgttatgccttccgtttccgaacctttcggtattgctccgctggaagctatgcagtgtggaactccttccatcatttcaaagcagtcgggatgcggtgaaattcttgataaggtcatcaagaccgattattgggacattcatgcaatggccgatgccatttactctctctgcactaatcccgctctcttccaatatctgcaggaggaaggcaagaaggaagtggatggaatcacgtgggaaaaagtaggcttgagaatccgcgccctctatgaggatgtgttaagaaactatggtaaataacaaaaacaataatagaaatgagaactatctgtctttattttgaaatacatcaaatcattcatctgaaacgttaccgtttctttgatataggtatcgatcattattactacgatgattatgccaatgaaaccagtatcaatgatgtagccgaacgctcttatatcccggcattgaacactctgattgaaatggtgaagaattccggaggtgcgtttaaagtggctttctccatttcaggggttgcgctggagcagttggaaatatatgcaccggctgtcatcgacttgttgcaccagctgaatgatactggttgctgtgagttccttgccgagccttattctcatggcctttcttctctggccaacgaggattgcttcaaggaagaggtgatgcgtcagagcgctaagatgaagcaaatgttcggtaaggcgccgaaggtgtttcgtaattccagcctgatttataatgacgagattggtgcgatggtggcagctttgggattcaagggcatgctgacggaaggagccaagcatgttttgggttggaagagtccgcactatgtataccattgctccatgaatcctaacttgaagttgctgttgcgtgactttaagctgtctgacgacatcagcctacgcttctccaactccgagtggaacgagtatcctttgtttgccgacaagtacatcaactggattgatgctttaccgcaggaagagcaggtcatcaacatctttatggaactctctgctctgggcatggcacagccgttgtcttccaatattctggaattcctgaaggcacttccatactgtgccaaagaaaaggggattactttctccacaccgacggaaatcgttactaaactgaaatctgtttcccagttggacgttccatatccgatgtcttgggtggacgaagaaagagataccagctgctggctgggtaacgtgatgcagcgtgaagcattcaacaagttgtatagtgttgccgaacgtgtccatctctgtgatgaccgtcgtatcaagcaagactgggattatctgcaggcaagtaacaacttccgtttcatgactaccaagcaaagcggtgtcggtttgaaccgtggcatttatgaatctccttttgatgctttcaccaattatatgaatattcttggtgactttatcaaacgtgtcgattctctttatccggtagatatagataatgaagaactgaatgcattgctgaccactatccaaaaccaaggtaccgagatagaggaacttcataaggaattggcgaaagcgcagaccaaactggagaagataaaggctgcggaaaagaaagagggcaaggctacagctaaatctgccgcagaaaaaacggcaaaggccaaggcttctgccaaaaagcctgctgcaaagaaaacaactaaaaaggctgctgaataatatcggcagctttcccatcaatcataaaaaagccttccgctcatcgtagagcggaaggcttttttatggaatatctgtcagttacttgttgaaactggtgtatgtaacttctatcttcagaggcgattccacttcgccttttgcattctctttcggaccgcctttcagtttggcatatcccggcttgaggtcgttttggataccggttatggttttgttgccgctactgcttgtactgttgtcataggtaatggaaaccggaatcagcaataccttatcccagtcttcattttctttgttccaagttttttcccactctgtctcattccaagaactgccggccttttctttggcggctttcttggcagcttgtttttcgttgatgcaagtggtaaccaaccgggcgatgttgctgaatacatattgattagtggcaaatgcattgtgggtggttgtaaatgaggtaatattatccatgactttgttctcttcaaagaagcttttcaagtcttgtttacgtatcaacagcacgtcattgggagcactcatgctatattcatagtcactgtttatattataattcgtgaaagttaacttcacggcattcaaggtgtcattggtcagtttattgtatattgaatcgtatggcatggtagcttgagtgaagataccggcaggagatttgatataggtatgttgagtttcggcagcctttgcttttatcaaatcagaattcagaaactggtttgcctggataacctctttggtagaggcgaatacagtttgcatgctatagaacaaagagtctgtaccatcttttttcttcagtgctacaccggtagtatcatttacgtggtggaaacggaattgcatttgcagagccacataatccacatagaggatggttccatctccataatcgctcttcacgtatactcctttgaaaatcttgtctatgaaagttgcggcgtctttaaagtattcgggatgctcgcgataaaccttcaatattctgtcttcgccgaaggttttcttgtccaatgggaacgttacattgggatagaaagtataataaccgttattgtccttttcaaatctcacagagtctggaacagacgtgtcgaaagctgaataggccttacgtccgagcagggacttggggtcatacttattgtagtactcctctggattgatgttggtatagcgatttttgtccagcttcttgtccagttcatagacactcattcggcatgcattcagggaatcgccgaaccaactggaataatagactgctagttgtactgaaactaccgagtcggcagtcattgtacctgttgccttgattggatttccttcactgtcccattcggtcactttatacacttccggaagtgagaagttctccgtacagttcagctccgtaaggaaacttgtttcgtaataaccgaattccgggtcggaaaacttgcctatatagccggtactcgttttggcaaatacggaatcaacgggaaatgaacatgttgttacattaaaagtagcagtatgcgctgacatgccgtcagaatcgggcaacatacccaggcctaatgtgccggtgttgtcatcgcatccaaagaaagtcaggactgccaaaagtaatgttcccagatatcttactttcatagttttaactgtctaaatcgattttatttttgttctgttttccataccttgtcgtagaagtcgttgcaggcttcagcaaagttttcgggagattgatattccaatacgggctttccggattcgcgggcatagttcagtacttcctcattgacgtgttcgctttgctgtataatgccgtcggagaagtcagcagccagtttgcaaagtgctgtgtagtcaatgggttccttcaatcctgcaatatcttttttggcaatgcctttcaacaatagcttgttagaaaagtctgtgtggaaagcttgtttgaagtcatcttcataaagggaaaatatgactttggcatctctgaaagaaggttcgtctttataggctttcttgatgtacagaggcgctaaagcggtcatccagccgtggcagtggatgatgtcgggacaccaacgcagtttcttcaccgtttccagtacgccgcgggcatagaagatggcacgggcatcattgtcttcatactcttcaccattttcgtctgttacctgcaagcggttctggaagtagtcatcgttgtcgatgaagtatacttgcatacgtgcagactggatagaggcaaccttgatgatgagcgggtgatcggtatcgtcaatgatgaggttcatgccggagagtcgtatcacctcatgcagctggtttctgcgttcgttgatatttccccattttggcataaacgttctgatttctctgcctttttcttgaatagcctgaggtaggtttctgcctacgagggacatttcggattctgaaacgtaaggggtaatttcttgggttataaataaaaccttgttcgcctttgtcataataacaatgttctcaattattctgcaaagatataaaaaaaatcgggcaataaagcaaacagagcccgtctataattccttatgaattgttaactgattgttgttcagtgagaaatcttcttttggaattgtcggaaagtgtactgagttttgcattaatttgtgatatttcttctttatatgctaaataatggtttattttgcaccgcttttgagaacaaccaagttattatataaccaattaaaatggaaatagtacatactatcaaggacttgcaggccggactttcggctttgagagcccagggaaagaagataggtctggtacctacgatgggtgccttgcatgccggtcatgcctcattggtgaaacgttgtgtggcagaaaatgacgctgccgtagtaagcgtttttgtaaatccgacccagtttaatgacaagaatgatttagtgaaatatccccgtacgccggaggctgattgccgtttgctggaggagtgtggagcggcatttgtctttgctccttcggtggaggagatgtatccggaaccggatacccgccgtttcagctatgcaccgctggacacagtgatggaaggggcattccgtccgggacattttaatggtgtttgccagattgtgagcaaactgtttgatgctgtgcagccggatcgtgcctacttcggcgagaaagatttccagcagctggcaattattcgcgagatggtccgccagctgaagtatcctttggaaattgtaggctgtcccattgttcgtgaggaagacgggttggctctgagcagccgcaatgcccgtttatctgccgaagaacgcaaaaatgcactgagaatttcgcagactttatttgaaagtcgtacctttgcaacctcgcatacggtaactgagacacagaagtttgtggaagacaccatcgcagccacccccggattgcgtttggaatactttgagctggtggatggcagtaccttacagaagattgccgattgggaggaaacctcttatgctgtgggttgtatcacggtgttctgcggggaagtccgtctgattgacaatatcaagtacaaagagcctgctgccttgtaatttataattagtaattcgtaatttataaagatatgatgattgaagtgttgaagtcgaaaatccattgtgcccgcgtcacggaagcaaacctgaactatatgggaagcattacgattgatgaggatttgatggatgctgccaacatgattgccggcgagaaggtgtatatagccgacaataataacggtgaacgttttgaaacctacattattaagggcgagcgcggctctggaaaaatttgcttgaacggtgcggcagcccgcaaggtgcaacctgatgacatcgttattatcatgtcctacgcgctgatggactttgaagaagccaagtcattcaagccgacggtgattttccccgacccggcaacgaacaaggtggtgaagtagtctctttattgaaatatggaaataaagccccgtttgcaatttttctgtaaacggggctttgtttttacttctgattcttccccgcagggttcgtatgagaatgaggagccgatttaatcttatcgagtaaatacagaatctcagtttggacatcgaaattatatctttggtagtcctgataggtgggcatcaagtccggataaagtgtgtgggcacaccggtctttgcccggaaagcatatttgtatggagttggagatagagccttgcatgccggtataaggtaaccggaataaggtttgttccatataggtattgggggcttgtccactgggtattcctacaagggtagcacccattttccacagatagaaagtgtagtggaaagctgcactgaaggtacgttcgttggtaatgacgtaaatgtgttccggagtatagagcgcctttccttgttgctttctcagttcttccggtgcactggacatacagttctcgatgaagtcggcccgtcgctgttctatgtttgtggtatctgcttcgtccgtactaaaagtgtagtcaccgtaggtatagtctgttccgtatgtttggttgaaatcctgcaagtttgtctgtagtttttgcatgtagaggggagagatgatacgatagaattttatatccatatccgtttgcaggaagtggtcaccgaacagttggtaaagtgtgggtaggacaatcggagtccagccgccgctattgttgcgcaaatctatgatgagagtggaggaggcttccttcttcatctctttcaacatatgggcgaaaacttcggaaagggacgggagttgccgaatggcttgcagggtatcggcgggcatatcttgtttcaagatatcccgataatagaatcctatttgccggtataaatctttcagcccttgtttttgcatatactcaaaattatcccgtgccatgatactgttgatattgatgagcattatttgcttgtcgttgtctacgaactgataggtcagttgtttgtctgtataagctttccaactgttattgtgttgcatgggtgtgttttgcacttcctgccttgacaataagggaagggttaatcctcttgatttgccgtcgggagagtaagaagtgagaggtgaaggttgtctttcatttcagggaaaagctgtctcaagaaatgttccgtaggcatggacttgcatagattggcataacggtcatataggttttcactggcttggatagcggcagtgcgggccagtacctcttctaaagaatctccgttgatggttgtgatacggctacctaacaagtctttgtacgtttcagggattccttgaagtataatgccgtcggggatggtgcgtacttccagtgccaggtaacgctgctttgcttgttgattggctgtgggaggtaaaaggtaggtgtgtccgtcttgcagattggataggaaaatgcttaccttgtcaaaaaaggtctgtttcgtactgggagtccggcgtaactcgttctccagatggaaagcttgttcgtagaagaatacttttcctccgaagccgctgtaagggtcaggatgggttgctgtcagttcttttaccagataccgaaagtctgaagcaagggaatccccgtttaggggctcttgggcgcttgccaatagggaagccagacagagaaggaaggatagatgaatatgtttcatattcttgaaatattaagttgtatgttagaaggggaaagtagaaggagaggttgtagtagaataaaaaaggtggagttcgtatgtctccacctttcatgacagattcttatttttttagctgttcgttcatcgctgctgctgcctttcgtccgtctcccatggcaaggattacggtagcacctccgcggacaatgtctcctccggcaaagatggtcgggatggacgactgcatgttatcgttgacggcaatcgttcctttccggcccaattccagtcccttgatggagcttgggacaatcgggttgggagatacacctacgctgacgatggcaaggtcaatgtcgatggtttccgtggctccggggatgggtacgggactgcggcgtccgctggcatccggttcacccagttccattttctgaagcaccacttgtttcacttttccttgttcgtcggcaatgtattcgattgggttgtggagggtcaggaattctacaccttcttccttggcatgtttcacctcctcgatacgtgccggcatttcttcttccgaacgacggtagataattagggcgcgcgctgcaccgaggcggcgtgcagtacgcacggagtccatggcagtattaccgccgcctatcacggctacacatttgccgaagggaaccggtgtatcggaatcttcacttgccgcatccatcaggttgacacgggtcaggtattcattggacgagaggatattgatggagttctcgccggggatgttcataaagttgggcagtcctgcaccggaagctacgaatatgcctttgaagccttcctcttccagttgttccacgctgagcgtcttgccgatgatacagtccttgacgaattctactcccattttggcaaggttgtcaatttctacatccaccactttgttgggcaggcggaactcaggaatgccgtatttcaatacaccaccaatctcgtgcagtgcttcgaaaacagtcacgtcatagccatacttcgccatatctccggcaaatgacagaccggcgggacctgaaccgatgacagctactttgatactgttcttttccttgatttcaggtatggagatttgtccgctctctcgttcgtagtcagcggcaaaacgttccagatagccgatggctaccggcttttcgttcatcttcagatggatacatttggattcgcactgtttctcttgcggacagacgcgaccgcagacggcaggcagcgcactggtttctttcagtgtcttggccgcttcgaggaattcaccgcgctcaatgttcttgatgaagcgggggatgtcgatacctaccggacaaccttccgtacatccggggttggcgcagtccaagcaacgtttggcctctgtcagcgcttgttctttcgttaacccttggttgacttcctccttgcggctgtgcgagcggtattctgcatcgagctcgttcatctccacgcgtggaatggcagtccgttctttggctttcatggatttgcgtaactcctgacgccatgcagcattacggcttttctcatcttccatgttttcactggtagcttggcaggtctgaggttcttccagcttgtgcatctcctcgcgttcgatgcttttaaaagcgcccatacgcttcagcatctcatcgaagtccacttgatgtccgtcgaactcagggccgtccacacatacaaatttggtctttcctccgatggtgattcggcaggcgccacacatgccggtaccgtcaaccataatcgtattcagggatacatccgtggggatttcgtatttctttgtcagcaaacaaacaaatttcatcatgatggcggggccgatggcgaaacacttgttcaccttctcgcgcttgatgacttcttctacgccttccgtcaccagaccttttcgtccgtaggaaccgtcgtcggtcatgataatgacttcgtcggagctttcgcgcatctccttttcaaggatgatcagttctttggtacgtcctgccagtacggtgatgacgcggttgccggcagctttcagcgcttgcacgatagggagcatgggagctacgcctacaccacctccggcacagaccacagtaccgaagttgtcaatgtgcgtagcttgtcccaacgggccgacaacatccgtaatgtaatcgccttcgttcagttcgcaaagacgggtagaggagagcccgacttcctgaaccaccagtgtgatggttccctttaccgggtcggcttccgcaatggtaagcggcatacgttcgcctttttcgcccacacgtacaatgacaaagtgccctgccttacgtgatttggcaatcaatggtgcttcaatgactaacttaaagaccttttcagaaaagtgttctttgctaatgattttattcattatctaataattttgttggtgtaattacgcaattactgtcagattgatagattttgcaaagataggggttatttggtaatatcaaaagaagaatagggtaaaactgcatgttgtcactggataacatccctttgtcactataatttgttcactttctacagcctgcctacttttgaaataaaaaatgaggaagagtatgtatcgaaatgtttttttaggggcaattttattgagtatgcctttggtggtttggtcgcagcaggatacgattgccgaccagcgtttggaagagattatggtaactgctaaactcccgttggtagaaatatctgccggtaaaacaagttatcggatggatgcatctgtcactcaaagtacgggcagtctttatgatgttcttgcttccctgccgggagtcgtgatagattccaatggcaatattttgttgaacggacaaagcggtgcaacgattctgatggatggcaagcctacttatctttcgggagatgaattgatgagtctgttgaaatctactcctgcaactaatgctgataagatagatttgataacccagccttccgcacgccacgatgcggcgggaagctccgggttgattgatatacgtacaagaaaaataaggctgcgcggtgtgaatctggccttgaacggcaatggcagtcttggacggacgggtggcggttatggcggcgtttccatgaatgtcagggagaataagttcaatctttatttgaattattcgtattatcagggaaaggatgtcatagacttgtttatcgaccgtgcgttcgaacgggatggaggaagaatgatgcaggactcttaccggaagcgtaggaattattcgcactattttcgtaccggatgtgattattatctcaatgaacggacagtttggggagtctcgttgggtggaaacttttcccggcaaaaggaaaatgcaggcatgtttacggaaatccaagaaatcggagttgcgggaaatacttatagctatgcggagcaaaaccggaacaatctttctgccgggaccagtatggtgcataagcttaaaagagaagggggagaactcagcgcttcttttgattatttccattattaccgtgttggaaaccagttgatggatagttttaagcccgatacattgaaaggggacatgaagggaaatacagacttatatgtcggacagatagatgcggtttatccattaagtgaggtttggaagttgcaggccggagtcaaaacctcatttgttacgatagacaatacggcaggttatatgcgtccgtcggcttccggctggctgccggacggggcgcttggttcccgatttgtatatgatgaaaatatcaatgcctcctatctgcaagccggctatgagaaagaccgcttgaaaatctcagcgggtctaaggttggaacatacccatgtacacggggactttggaggaaatacacaacagaaagactcttcgtttacaacgaattacttccatttgtttcctaccattgctttgcaatacggtttgacttcggaacatttgtttcagttttcgtatggcaggcgtattacccgccccaattatggtgatttgaatccttttacctacatattcgatgactatacccatgaaggaggaaatacaaaactgcatccttccttttctgataatatagagttggggtatgtgtatcgtgactggtttcagacggttctctttttctcgtatacagatgatgctatcatgaagagctatcgcgaacaagaggaacggcgtatctatgtaatgcctcagaatctgtcttcctatgtacagacgggtgtgcgtgtacatgctgccaacctctcacctgcttctttttggaaagtgaatctgaccgctatcggtatttataataattatggttggacggaacaagggcagaaaatgaaaaaccgtatgtttaccccgatactcggctgcatgaaccagtttgctttcgcttcagtatggtcggccgaactttcggcaaattataatgggcgaatggcctacggacaagccactgtacatccggtgctggaggtgaacatcggtatccaaaagaagatgttccgtaacagatgcaccgttaccttgtttgccaaggatgtattcaacaccaattatcaaaaagtagatattcggtctcccggtgtgcaggcgtttgttgacgaacggcacaacaaacgtgtgctgggtattgctttctcttggcgttttcaaaaaggcagcgatacaaaagaaagcagaagaaaaaaagaaatagatgaaacaaaaagagtaaatttgtaactactatgggcagactgtggaacaaatggctgatgccggcattatttgccgtgattctttttctatgtattcgtgtggcgaatgatattccgaaacatgaatactattgggaaagcaatgagtggaatttcatgttgaaggatatgcttgtggtactcttcatgtcttaccctatcttttttctattgaagtattggctttgtttgtgccggaagcggaagctggtgtggtggcaggaatacggggtggttgtcctgacagctcccgtctggtgtcttctgacgatgtgggttatccgctttttgatgggggtaagtcttgatttatacgatgtgcctattcccgccatagtcagtatgttgcttggcggcttcttctatatattcttgcgtaatcagatgatacagaaggaaaacgaagctcaacgcctgcaattggagaagataaaaaatgaccagctccagacagagctgaaattccttaaagcgcaatatcatccacattttctttttaatgtactcaatacggtttattttcagatagatgagaataatgaggctccacggcatactcttgagcaattgtccgatttgcttcgttaccaattatacaatgatggggagaaagtgcaggttcgtgtggaattggaatatctgaaacaatacatcagcctatgtaaacttcgtgctacgaagcggctgcagttgcaggtgcatttcgatgaaatggaggcgcaggttgagatttatccattgttgtttgtaccgttggtggagaatgctttcaaatatgtgggagggaactattttatagctatggatatgtgtctgaaagaaggcaagttgtgttttagtattgaaaattctataccggaaccattagtgcaccagaaaggaaaacatggaatcggcatagaaaatctgaggcgcaggctggagctgctatatccggagcgtcatacgctggacataaatagaggagatactttgtttagagtaaaacttgtgatagaattataggatgaaacaggtaaaatgtgtaataaccgatgacgagcctactgcatgtgaaggattgcaacgctatgtggaaaaggtggatttcctttctttaatgggtgtatgtgaagatgctatgcagttgaacactcttttgcagactgagcagccggacttgttgtttctggatattgaaatgccttatctttcggggcttgaactcttggcatctcttgcccatccgcctcatgtgattatcacttccgcttatgagcagtatgcattgaaaggttatgaacttgatgttacggactatctgttgaaaccgatttcgtttgaccggttcctgaaagcggtgaataaagtacatggtcttttgcagcaggagaaatggccggatgaagctaataattttatatttgtccgttcagaccgtcagatgcataaggtgttgtttaaggatattctggtggtagaggggctggaaaattacgtctgtatttatacggaaagcacaaagctgcttgtacgttctaccatgaagcgtatgatagaggctcttcctggtggagtatttcagcaagtccataaatcatatctgataaatttggaaaagattgagatgatagatggcaatcggattatagttgggaggcatactgttccggtggcacgtaatttccgcgaggaggtgtttgcacgtattttgaagaatactttgtagttgcgcaggagaagcttgtcatgataaaactctgggcacgaattacatgaatttcacagttgcggttagcaaaaaacgtgaaatccatgtaattcgtgcccgaaagaaagtgtcaaaggcgtattgctgcacgtgactattatggccttagtctattatttcaaatcccgtatacggaaccaatgcctttggtatgcggattccttctggagtctggttgttttccagcaaggcggcaacgatgcgtggcagagcgagtgcggaaccgttcagcgtatggcaaagctctgttttcttttctgccgtacggtagcggcatttcagacggttggcttgataagtgtcaaaattagagacggaacttacttccagccagcgtttctgtgcttcggaatacacctcaaagtcaaaacagagggcagccgtgaagctcatatcgccaccgcaaaggcgcaggatgcggtaggggagttccagtttttgaagcaaaccttctacatggtccagcatttcctgatgagactgtttggagtgttccggcttgtcgatgcgcaccagttctactttggagaattcgtgcagacggttcagaccacgtacatcttttccgtatgagccggcttcgcgacggaaacattgagtataggcgcaattcttgatgggcaactgtttttcgtccagaatcacatcgcggtagatgtttgttaccggaacttcggctgtaggaatcagatataagtcgtccacttcgcaatggtacatttgtccttctttatcgggaagttgccccgtgccatagccagaagcggcgttcaccactgtcggcggcattacttctgtatagccggatttgcgtgcctcgtccaggaagaagttgatgagcgcgcgttgcagttgtgcacctttgcctttgtatacggggaatccggcaccggtaatcttaacgcccaggtcaaagtctatcaagtcatatttcttggccagttcccagtggggcagggcatctttgggcaattcggtttccatgccgcccatcttctctaccacattgtcgtcggcaccgacgccttcgggcacactgtcatagggaacgttggggatggtgtaaagtaaagtctgcaaatcgttggcagcctgctccatattggcttgcaagtctttgttgacttctttcagctcggccacgcggcttttggcggcttctgcttcttctttcttaccctccttcatcagttgtccgatggatttggagagtgagttggcttctgccaagtttttatctaagatggtttgattggcttttcttttgtcattgaagtccagcacttgtgcaatggtttctttcgcattcttgaagtgcttcttttccagtccgcggagaaccgcgtcggtattttctgtaatttgtttgatggtaagcatatcttatacttgtttttatgttattcggttttgtgagtgcaaagatatggaaaaaacaaataaagtgttgcttttgacatgaaagaaagggatgcaatccattcggattacatcccttttccttatttcttgttcggaaacttatgcttctgcgttttctgcggggataacagaaactgaacgtctgtcttccttgcctactttgaactttacagttccgtctactaaagcgaaaagagtgtggtcttttcccatgccgatgttctcacccgggtggaattcagtacctctttgacgaacgatgatgttacctgccttgcaagcttcgccaccaaatatcttaacgcctaatctcttgctctgtgattcgcggccgttcttagaactaccgacaccttttttatgtgccattttttcttactgttttaattgattaagctactacttctgtaattgttaactctgtgaattgttgacggtgaccgttcaacttacgataaccttttcttcttttcttatggaaaacgagaactttatcgccttttaccatgtttgatacgacctggcaaacaacctttgcaccctctacagtgggagcacctacggtgatgttgccgtctttgtctaccaaaagaaccttgtcaaactctactgttgcaccgttttctgcattctggatgtggtgtacaaacagttttttgccagcttctgctttgaattgctgaccgttaatttctacaattgcgtacatttcttatattaatgtataagttagctccgtcgggtggtctctaatcacttagaaagcacttggtcgaacccggtgcggaataatcgggcacaaaagtactctttttattctaaatgggcaaatgttcttttgcttttttattcttttagtgcagattgtacttttggcctattggagaaaaactgtttcatcaagaagagacaatttatgtagggatggttgttgttacaagatgaatttcagtacatagataccggccagcattagtgccatgacgaggcatgcaaatatgacgagtagcacaagactgtaagtcagcatgaggatagtgcaccaaaagcttctccaccaggtgcagcggtacaattgtttgtaatcgcaacagaataggacgaaaataagccataaaggcagctcatacaaatcgtctacctttgcacacccgttgaaaggcagcacgatgatgcttagcaggagtatctggcaagctatgtaggcttgtatgaatacatgctccgtggtattgtagtttaacttatatttccggcgtcggaaggcaagttgggtagcaagtgcaaacagaggcagtgtggcaatgatgcggaatgctttgtttccgtgtccccagctcttcatcagattccatactttcattaggaaaggagagttctggaagactttttccagtctgtctcccacctccgaggtgtcgtttacaaactcatcgatgaggtcgccatcatcgctgttcgattcggatacctgtgtggcagaagtggagtcgttcttctcttccagtttgttcaggcttttctccaggctttttatagtgatggcgagggctcgcttttcctctttgctataggttttctccatcttttgggtaagcttctctttagcggcaatgatttcttctttgtctgtctgctctgtctttgccgtctttgcttttttgctcagagcttccgggtctaccagttgcacagccatgatataaagagctgcaagaatgaagagtgtctggaacgggcggaaatattctatacgcttaccaccgatgaagtctctaatcatgtatcccggacggtagaggagttccagaagggtacgtccaaaaccattgtctatattgaagaagcctccggcaatgtttttaagggcgttgcttagccggtaacgtggagtgtttcggctttgtccgcaacggttacagtagttaccggtataggtggtgccacaattcaggcaagtgcaggtttcggtacccgcaggaggagttttccttccttgtatcagcttgatgtggaatgcacgcaggcgtactgcgtaggggtgccaccatgagtcgatgaaagttcttgctttgttggacagtatccttcttttttggaggatgccccacaatgtcagtatgaagacaaccgggaagaagttgctgtcgtcggtcatgtccagctcttcaatagccaaccaaaagagtgtcaatagaaggaggatttgccaggcatttatccttttctgtttccggggagaagtggcatacatattttccggtcggatgggactttcaatcttgaatatggagggatgctcctcctggactgccagcagttcttccaaagtgctcattattttccggtgtgggtatttttccaattctctggcagtggttactccgtgggtgaccccggcaaagtctactccggccgcttgggctgtttccgcatctatcgtgctgtcgcctatatagagggtatcggttttgctgacatgtagccgcttaatggcaaggagtagcccttcgggagatggcttggcggttttcacgtcttcaccacccacgatgatgtctataaaatcttcaggaaaatgctggtcgaggagttccttgatgcggaatcggtatttggtcgagatgattccgatgcgggcgccagagtcctttagtgcagtcagtacagacttggtttccaggaaaagcaccgtattgacagtcatatgcgtatcggcctcttttcggtattctgccttgaatcctgccagttgtccggcatctgtcacgccggtgaggatggaaaaagagttttccagagtcttgccgatggtacgtttgatgtcgtcatctgtaacctctgtatatccgtgacgggtcagtacgttgcggaaacaagtgacgattccgcgggaagaatcagcaagcgtatagtcaaagtcgaaaagataggtcgtgtaattcattgtgactttttgtggcaaagatagtgtaaagtatatttttacaaaataaaaaagaggattaatcggaattttgtattacttttgtttgcatgaattctgttgaaaaagtgacaagatgtgtaagtgttttatccggttaggttgttatactatacacgttaaccctataatgttatgaatttgataaaatcttgttgtttgtttgtggtcttttcatcctttctggcatgtaccccacaagtgtcggatgtgaagagtgtgtcttatacagagttcgtgaacccctttatcggtacagattttactggaaacacctatccgggtgcccaggcaccgtttggcatggtgcaactcagtcctgacaacggactgccgggctgggaccgtatttccggatatttttatccagacagtaccattgcaggcttcagccatacccatctctccggaaccggcgctggtgacttgtatgatatctcttttatgccggtgacattgccttataaggaggcggaagctccgctcggcattcactctttgttctctcattcggaagagtcggcaagcgccggatattaccaggtgcgtctgaaagattataatatcaatgtagagttgacggccaccgagcgttgtggcattcagcggtatactttccccaaagccgatgctgccgttttcctgaatttgcggaaagccatgaattgggattttaccaatgattctcacatagaagtcgtcgattcggtaacggtgcaaggttaccgttactctgacggttgggcacgcgaccagcgcctctacttccgtacccgtttctccaaaccgtttgttgtgatgcagctcgatacagctgccatagagaaagatggcaagcggatagggacatccgtcattgcacgattcgactttcagactaaggaaggagaacagattcttgttagtactgccatctccggtgtgagtatggaaggggcggcacgtaatttggcagccgaagtacccgatgatgatttcgacaaatacctggcagctgtgcaggatgattggaacaaacaattgtcccggatagaaataaaatgcgatgaccgtgatgagaaagtcaagttctatacggctttgtatcattcgatgattgctcctaccatttacagtgatgtggacggtgcttattacggtcccgacaagcaagtgcaccgtgcggagagctggacaaattacagtactttctccttgtgggacacttaccgtgcggctcatcctctctatacctttattgagccggaacgggtgaacgatatggtgaagtccttcctcgccttcttcgaacagaacggtcgccttcccgtatggaattttcaggggagcgagacagatatgatgataggttaccactctgtaccagttattgtagatgcctatctgaaaggtattggggacttcgatgcgaaaaaggccttggaggcttgtgtagctactgccaatatcgattcttatcgtggcattgggttatataagaaatatgcttatgttccttataatgtgacggatcagtataattcggaaaactggtcactttctaaaacactggaatatgcatacgatgactattgtatagcccgtatggcagagaaactgggcgataaggaggtagcggacgagttttataagcgttcccgtaattaccggaatgtttacaatccggtaagttctttcatgcagccccgtgatgacaagggagagtttatccggaacttctcgccggacgactatactccgcacatctgcgagagcaacggctggcagtacttctggtctgtacagcaggatattgacggcttgatagctttgaccggaggtaaggaacggtttgcccagaagctggacagtatgtttacctataatccttctgcagatgatgagctgcctattttcagcaccggaatgattggccagtatgcgcatggaaatgagcctagccatcacgtcatttatctgttcaatgctgtggatcaaccttggaaaacccagaaatatgcagcccgggtgatgcatgaactctacctgaacactcctgccggtttgtgtggcaacgaggattgcggacagatgtctgcttggtatgtgttcagtgcgatgggcttttatccggtagacccggttggcggaaaatatgaaatcggtacccccctatatccggaaatgaagatgcacctgcctggtggaaagacctttaaggtactggcaccggcggtgagcaaggaaaattgctacattcaatctgtcaaactcaacggtaagagctatgacaaaagttatattacgcatgaacagataatggatggaagtgttttcgaatttgaaatgggggataagccaggtgatgcatggtacagcccccgataaccggctaaaatatggatgaacatttcgacttgacatataaatcccttttccgcaggtattataccaatctgctgttctacgccacacgcattgtgggggaagaagatgcggaagatgtggtgcaggatgttttcgtggagctgtggaagcggaaagatgccatgaaggtgggagagcagattcaggcttttttgtatagggcggtgtatacccgtgccttgaacgttctgaagcatcgggacattgtaagtggctatgaggctgtcatgctcgaaatccataaaaagagggttgagttctatcaacccgacagcaatgatgtggtgaaacggatagaggatgccgaactcagaaggaagctgtccgatgccatcaatgaattgccggacaagtgccggatggtattcaaactcagctatctgcatgatatgaagaataaggagatagctgatacgatgggagtgtcattgcgtacggtggaggctcacatgtacaaagctttgaagttgctgcgcgataaactggggtatctgaacctgatgttggctctgtttttcatcgggaaagtaagtgtttttgcgagcagcgttgttttattatcataatgaaggaaagaatgaataagttgaatgaggagatattggccaagttccttatgggtgaatgtacggaagatgaacttcgtgaggtgaacgcctggctggaagggtcgggtgagaatgcacgcgaattgttcaggctggaggagatttaccacttggggagactgggggatacttcgaatgcacaagacatagaaaaggtcgaaaagcgattgtttaaaaggttggaacaagagaagacgaaacaatacaaggtacggaggatggttggatggatgcggtatgcggccgtatttgtgggcttcttccttttgggtactttcggctatcttttttatcagacttatagccagccggaaacattactggctgtcaccactcatgataagattaaggaattgaaactgccggatggcacaaaagtctggctgaataaaaatactaccttgaaatatccgtatgagtttgcagggaagggaagaaaggtttatctggaaggagaaggatattttgaggtaatgaggaatccggaaaaaccgtttgtcgtacagagtgaggccatgcaggtcagagtattgggaactgttttcaacctcaagtctgacaaggctaagatgtctgcagtagctacccttctgaaaggcgaagtagaggtgaaaggcaatcatggcgagggtatgattatccttgcccccggacagaaagccgagctgaacggaatgactaggcgtctggtggtgaagcaggtggatacgggaatcgaaaactggcacaataatgagtttgtctttgagaaggctgacctatacaccattgcgcgtacattggagaattcgtatggggtgaggataattctggcaccgaacatagatgtaagcaagacctactcgggtacactgaagaaaaaagagagtgtgggggctgtgctgaatctgataaagaatgccattccattggagtataaaattgtggggaacagtgttttcctctcctcaatgaagtaggaaggccgcacaaatccgagatatgacgagaagaatttatttaatactaacaactttctaatattatgcgaaaattaatcctattgtttctttttgtgagcagttccttgtggctgcatgccaaggactttacccagtatgtcagtcctcttgtcggcacgcagtctactttcgagctttccaccggtaatacctatcctgcgatcgcacgtccctggggtatgaacttctggactcctcagactggtaagatgggtgacggctggcaatacgtctataccgcgaacaagatccgtggtttcaagcagacacaccagcccagtccctggattaacgactacgggcagttctccatcatgccggtggttggcaagcccgagtttgatgaggagaagcgtgcaagctggttctcccacaagggcgaagtggcacttcctcattattataaggtatatcttgccgaacacgatgtggttaccgagttcacccctaccgaccgtgccgtattgttccgtttcactttccctgaaaatgatcattcatacgttgttgttgatgcctttgacaagggctcttatgtgaagatacttccggaacagaatcgtattatcggttatactacccgtaacagcggcggtgttcccgagaacttcaagaactatttcgtgatagagttcgacaagccttttacttataaggcgtctgtagccgatggcgtcttgaccgagaataaggttgagcaggaagccggacacgccggtgctgttatcggcttcaaaacccgcaagggtgaagtggtacatgcccgtgtagcctcttctttcatcagttttgagcaggctgaccgtaacttgaaggagcttggcaatgacaatttggaaacattggttcagaaaggtcaggatgcctggaacaaggtgctgggccgtattgatgtggaaggcggaacccttgaccagtaccgtactttctactcatgtttgtatcgttccttgttattcccccgtgcattctatgaactggatgaggcgggaagtcctattcattacagcccttacaatggtcaggtgctgcccggttatatgtatacggataccggtttctgggatactttccgctgtctctttccattccttaatctgatgtatccgtcagtgaacaggcagattcaggaaggtcttgtcaacacctataaggaaagcggtttcttccccgaatgggcaagtccgggtcaccgtggctgtatgattggcaacaactctgcttccgtactggcagatgcctatctgaaaggtgtgaaggtggaggatgtgcagacgctgtacgaaggtctcatcaacggtacaaagaatgtccatcccgaggtctcttctacgggtcgcctcggctatgagtattacaataagcttggttatgttccctacgatgtgaaaatcaacgagaacactgcccgtactttggagtatgcttataatgactggtgcatctaccgcatggcaaaagagttgaaccgtccgaagaaggagcagaaactctttgcggaacgtgccatgaactataggaatgtgtttgataaggaaagcaagctgatgcgtggtcgtaatcaagacggccagttccaggctcctttctctccattgaagtggggtgacgcctttactgaaggtaacagttggcactattcctggtctgtattccacgaccctcaaggtctgatagacttgatgggtggcaaggaatctttcgtggagatgcttgactctgtatttattgttccacccttgttcgatgacagctactacggccaggtaatccatgaaatccgtgagatgacagtgatgaatatgggtaactatgcccatggcaaccagcccatccagcacatgatttacctttataattatgccggggagccttggaaggcccaatattggcttcgtcaggtaatgaaccgcatgtacactgccggtcccgacggttattgcggtgacgaggacaacggtcagacttccgcgtggtatgtcttctctgcacttggtttctatccggtttgccctggtacggacgagtatgtactgggcgcccctctgttccgtaaggctaccctccatttcgagaacggtaagtccctgacaattgacgctccggataactcaccggagaacatgtatatcgagtctctcaaggtgaacggcgtggattattccaggaattatctgacgcatggcaatttgcagaatggcggtaccttgaggtttgatatgggcagccagcctaatatgaagagaggtacgcagccggaagattatccttattctttctcgaatgaactgaagaagtaaagaatagtaataatatagtaagaaaagggttgcctcgaaaataagttgatatatcattttgttatttactatctgtattataggtgtttttcttgaatcaggtggaaataattatttacttcgttagtaatattgagcaaaatgatatatcaacttattttcggggtaactctttttttttaggattaatgataaaaaagatactttttcagtaagtgtattttcattgtctgttgttttatataggaatgcgagagaatgaatctctcgaagtaatttattgtataacctataaattgtgtttatgaaagacaattatgcttttcggagttcgacgttcatgcgggctttattagttttgttgttcatggcagtttctatccagtggggctttgcccaattaaacctgaatgtgtctcgcggcacattgaggacagtcattgaacaaatcaagtctcaatccaagtatcaatttttttatgacgacaaactggctgcgttgccggtagaaaacgtcaaagtgaacaatgcgtctatagaagatgctttgaatgttattctcaaagggaaagacatttcctataaagtggaggataacatcgtttatctttctgaaaagtctgctgctcctcaagagggcaaccaacaagggaaagaacggacgattaccggagtcgtgtcagatgacatgggacctctgattggtgtgaatgtattgataaaaggtaccagcaacgggtgcattaccgacctcgacggtaactttacgttgaccactacggaagcgaatccggtgatcgtattctcttatatcggttatactacgcaggaaattcccgtgaaaggtaatgcaccgattaatgtgatgatggccggagatacccaacagcttgaagaagttgtggttactgccctaggtatcaagcgttcggaaaaggcattgtcctacaatgtacagcaggtgaatacagatgccattacttccaataaagacgccaactttgtgaactcattgagtggtaaagtagcaggtgtgaatatcaatgcttcttcatccggtgtgggtggcgtgtcaaaggtagtgatgcgtggtacgaaatccatcatgcagtcttccaatgcactttatgtaattgacggtgtgcctattttctctggccgtggtactgccggaggtaaggagttcgactcccagggatcttcagaaccgattgctgacatcaacccggaagacatcgagtcaatgtcggtcttgactggtgccgccgctgctgccttgtacggttcggaagctgccaacggtgccattgtcatcactacaaagaaaggtaaagaaggtaaggtgagtcttactgtcagcagcaatactgaattcaccaatccgtttgtgatgccgagcttccaaaaccggtatggtacgggaaccggtggtgtgatgagcacttcaggagccatgagctggggagctcctttgtctgcagccaataattacaattacagtccgaaagatgattatttccagacgggtattgtagggacggaaagcatctctttgtcaactggtacagaaaaaaaccagacgtatgcatcggctgctgccgtaaactctaagggtattgttcccaacaacaaatacaaccgttacaacttcacggtacgtaataccactactttcttggacgacaagatgactttggacttcggtgcaagctatattctgcagaatgaccagaacatgacgaaccagggtacctacaataacccgttggtgggtgcttatttgttcccgcgcagcaacgactggtcggatatcagcatgtatgagcgctatgacgctgcccgtaagatttatacgcaatattggccggtaggggacgaaggtatggtaatgcagaatccttattggattaactaccgcaatttgcgccagaacaagaaggatcgctatatgctgaatgccggtttgagctataagattctagactggctgactgtttcaggacgtgtacgtttggataactccaataatgactatacagaaaagttttatgcttctaccaatacccagctcaccgagagttcttcacgaggtctttatggtattactaagacgcaggacaaacagttgtatgctgacttcctggtgagtatcaacaaatatttcggtgaagactggtcactccaggccaacgtcggtggttcattctccgatatacgttcggatgcaatgaaaacacgtggtccgattgctgacggtggtgatgctttcggtggtgaaccggtaggtctaaccaactactttgctatccagaacctgagtgccagcaagacacagcgcttgcaggagggatggcgtgaacagactcagtctctcttcgcttcggctgagcttggttacaagaatacttacttcttgacgctgaccggacgtaacgactggccttcacagttggcaggtcccaactccaacagtaaatcattcttttatccttcagtcggtggttctgttgtactgtctgaactgatgcctaacttgaacaaagattatctttcttttataaaggttcgtggttcatgggcatctgttggtagtgctttctccagatacttggctaatcctcactacgaatggaattcaagttctggtcaatggagtatcacgactcaatatccgttgtataatctgaagcctgagcgtaccaattcttgggaaatcggtttgaacatgcgtttcctcaaaaattttgaattggatgtgacatattacaatgccaagactatgaatcagacattcaatccgcagttgcctgtcagcggttggtcggctttgtatatccagaccggtgccgtacgtaactccggtattgagttgtcactgaactataagaatacttggaaggactttacatgggatactggtataactttttccagcaacaagaataagattttgacactggcagacaaagccatcaaccccgttaccggtgagttgttctctttgagcacgttgaatatgggtggtttaggtgatgcccgcttcttgctgaaagagggaggaagcatgggggacctttactctctgagagatatgaagcgtgatgccaatggacagatttttgtagaccagaacggagcagttgctacggaaaccattaccgatcctgacaaatacatcaaattgggaagtgtacttcctaaggggaatttggcttggcgtaacaacttcatctggaagaatttcacagcaggctttttgatttcagcccgtttgggtggtgtggtctactcacgtacacaagccatgttggattactatggtgtgtctgaggcctctgcggatgcacgtgatttaggttacgtattggtgaatggcaaggacaaggtaaatcccgaaacatggtatggtgtagtcggtagtggtacagctgttccccaatactatacttactctgctaccaacgttcgcctgcaggaagtttccttgggttacactattcccaaaaagttgttgaacgatgtgtgtgatatcaaggtttcgttggtaggccgcaacttatggatgatttacagcaaggctcctttcgatccagaaagtgtggcttctaccgataacttctatcagggaatcgactatttcatgatgccggctttgcgtaacatcggctttagcttgagctttaaattttaataccaaacgatatgaaaaagagaaatataataaataaattgattattgctccattgcttatgggctttatgtcctgcaccggcaattatatggatatcaattccaatccttatcaaccgggcgatttgactcccgatgattatgcactgggttctgccatgagtaacttggcaagtacggttatttcgtcagacgtcaatacggcacaatttaccgattgtttgttgggcggaccgttgggaggttattttgccgattcaaatgccggctggtccaatacaatatccaattttaatgctacgaatgactggacacgcgtattcttgatgagtgaccgtatcatctcgacattatatgctaacttgagcacagtgaaacaagtatcggagaataccaacaatccggttccctatgctattgcacaaatcataaaggttgctgccatgagccgcgtgactgatacatatggtcccatcccttattccaagattggtcaggatggcaagataactattccttatgatacgcaggaagaagtctacaatgcattcttcaaggaactggacgagtccattgaggtgctgactgagaacagaaacgcggcgttggtcgcttctgcagacttcgtatacagcggtaatgtacagaagtgggtgaaatttgccaactcattgaagttgcgtctagctatccgcattgccaatgtaagtcctgccaaagccaaagagatggctgaaagcgcagtgaatcatgaactgggcttgattgaaacaaatgcagacaatgctacatggaagtatttcggaacaatcagcaacccgctgtttatggcagtgcgttataatgaagaagcatcaggcggtgatacccatcctgctgctgacatcatctgttacatgaacggttacaatgacaatcgccgcgccagctattttgaagaatccaaatgggagggagagtcttatgtaggattacgccgtggtatcgatctcagcaaagcgagggaatctttcataaattattcacgggtgaagatttcctcttcagaccctgtgctttggatgaatgcagcggaagttgccttcttgcgcgctgaagctactgcagtctatggtttcagcatgaaaggaactgcggctgatttttatgaacaaggtgtccgcctttcttttgaacaatggggagctacgggggtagacagttatctggctgatgaaagcagtgtccctgccctttataaggatcctgctggtcttaatacgtatgaaaagaacctttcaaacattaccatcaaatggaatgagggagcatccaaagaggaaaagcaggagcgtatcattactcagaaatggattgctaactggccgttaggcaacgaggcttgggctgattaccgtcgtacgggttatcccaaactgttgcctgcaaccagcgaaggcaataagagtaatggaattgttgacagcgagaaaggtgcacgtcgcatgccttatccttctgaagaatatacaaataatactgaaaacgtgcaggatgcagtaagcaattatctgggtggaccggacaacatggctactgatgtatggtgggcacgtaaataataacaataaatgctgaataattatgaaattatataagaaatcatttaaaggaattgcgctggcagctttttccgtattggcattgtctgcctgctccgactggacagatacagaaagcatcaatttggcagaacccggaatcgacgaacagtctcccgaattgtatgccaagtatctgaagaacttgcaggaatataagaattctgaccataagattgtgtacggctggtttgataatagtgagaaagttcctttcagtcgtgggcaacacatgtcagatgtgcctgacagtctggacgtaattattgtgactactcccgatttagtggaattcgaactgaaagacattgtaagtgtacacgagaaaggaacaaaagtattctactctatcagttatgacaatatcttgaaggaacataccgacaaggtgaaggaaggaacggaaacgtccacattctcggcttatctttctgctgagttgaacagattgattgctctggaagctcctttcgacggcattgttgctgaatatcgcggcagcaatcctatctacatgtccgaagctgacaaggctgaagcaaaggcaaatcaagatacctttttcagtgtgatagccaactggaagagcgccaattcgggtaagaagctggtgttccaggggtatcctgccaacctgataggtcagtctgtactgtcttcttgtgaccatatcatcttgattacaaatgatgtcacggatgttgcccaactggggatagaagcgcttcaggccttgatggcagacggtgttccggctgaccgcttcattgtatcggcatctaccatctctctggatacaactgataagactaccggatattacaatgctttgagagctctgtcggaagccgcttattgggtgacagagccgtctgctgagtttataaaagctggtttggctattgagaacatgcagaatgattactacaatgcaaccaatacctaccaatacgtgagagaagctatcaatattatgaatcctgctcctaaaaaataaaagaatatcatgaaactgaaaagtatatatttagtatcgatggcattattggcaggtgtatttgctgcttgtaatgataatgacgttgagaatttcgataatcaggtgtatatcaacagctcggcgatgaccagcactgtgttgttgaaaaacacagtttccgatacggaaggttcattccggatttcaatggctcgccctgaatcacgggacataactatttccttgaaggcggacccttccttggtagctacttataacgccacctattatgacacagccgaggcgctgccggaaaattattatacggtagaaactccgcaggctaccattttggccggtgctgtcatttcagatgacatcactgtcagcttcaagaacttgacggaactggaccgtgagaaggtatatgtattgccggttacggtagaccaggcaagtatcggagtcttgaagagctccggtaccatgtactacgtgctgaagggtgctgcattgattaatacggttcctgatattaccaagaatctggtttacgtaacttggaccaatccggatgtagccaataatatgaataaactgacggcagaagcgttgattcgcgtaagcaagttcgacaagatgctgacttccattatgggtatcgaaggcaagttcctgctccgtatcggtgatgccggaattcctcagaaccaattgcaggtggctacaagcagtggcaatgtgactgatgagagtctggctattccgacaaatgaatggacacatatagctgtgacctacgatgcggatgcaaaaactgttatagtttacatcaatggtaagaatatgttggagactactttggactgcggtgctgtgaactgggggcagactatgactgatgaaggtaacggattctggattggtcattcatacaatcgtgaccgctggttggaaggtaacatctcagaggtacgtatctggaacaaggtgttgacatcagcagaaatcaatgcaaaggaccacttctaccaggtagatccggatgctgacggactggtttcttactggaagttcgatgaaggtgccggtactgccattcatgactatagcggaaatgagaacaatgctactgcagttgaaccattgacttggactgctgtggaactgcccgccaaataatttagttataccttaattcaaataaaaagatattgattatgaaatatatgaatcatgtaaaatcaggcttgctggcaatggcttttgcatgtgcaggaatatgctttaccggttgtgaagatgatgttgtcatcaacaccggcaacagcgacaagctggatactgtggatggcgtgtatggttatgtaaagtctgccgctggtgcacgtgaacttactccgatttccgtttttggcgacaaggttgctaccggacatctctattttgaactgagcaaagctgcagagcaggatgttacggtgaccttcaaagtggacgaagacgttttggaagcttataataagaagaatggaacaagctataaaatgtatcccgccgataagttgagtctggcgaacggtggaactgtcattatcaaggcgggcgaacagaagtcggcttctgtggaactgaatatcaatgcaggaggcacaatcggacaaacttatgctgttgccgtttctgcatctgccaataacggtgtggaagtttctacaaacaatcaggaatatatttacttggtaaagcctttggctgctattcctgagagtatcagtaagggtgatatacttacacattgctttgtggaagtaaatgacgagaacatcttgaatatgggtgaatataccatgaagagcgacggaaagcctttctttgatgtagtcagcatttttgctgccaatatcaatgtggatagcaagaccggtcgcgtacatgttttttgcaatgaccaggtttctttcttgctgagaaatgcggataagttcatccgtcctttgcaggctaagggcattaaggtggctatgactattcttggcaaccatgatgaggccggtatgggtaacctttctgaagctgccgccaaagactttgccaaggaactgaaggcttatttggatatctatggtttggatggcattgactttgatgatgagtacaccagttacaacaactccaaccccagtcccggcttcgaaaaacgttcacgtgccaacttcgcacgtttggtttatgagtgccgccaggtatttggagataaactgatcggtgtgtatgaatatggttcgcttgattctcccgatggcgaggtagaaggtgtgaaagttggtgatattgtggactatatgacctatggttattaccagaatcagaatcctaatggagcttttggccgtgaagcgtctcattttgagaacctgcccaaatccaagtatgctccgctgccttggaagattaatgatgagttgaacggaggttggaatggatttgacaagagcaaattccaaaaagtgaaagatgaaggttatggcattcagatgttctacaatcccaaaccgctgatgtatcagtattatacgctgctttcggaaataagtaaagtactttttgatgatgaagtggagtggagcggtaagtactggaaccgtactggtgaagcttatcaaggaaagatgatgggctatgaagatttggtcggtgaatggaaagtaacttccagtaactccctctttacctatgtggatgaagaaggcaatcctcgctggtgggattggaaaggcagtcaggattttgagaagaatgtaattatagagaaagatgaagaaggtaccggatatgtagtttacaactggggtactttccccgaaattaccggtaagtatccgatgcattgcgattactataacggtgcactgctcatctatccgcaaaccattcatgagggcgatgctgaagaccctgctacctacaagatgcatttcggtacttatagtaatgccttccagtggaaagcatatcctaagtatgataattattccatggatggcgatattgctcctaacggtgatatgcgtatctatggtttgggcaacagatgggctatcaacccttataagtatgtaggcggtgagattgagaacgacatcttccccgatgttccttacttcgtgagtgagaactatacgatgaagaaggtacgctgatgccatgttttccgtaaactgaggtttcggaaaaatggatgcttgaaccttttcatacatgaaacaaaggagggctttgctcaaagtaatggggcggccctcctcaagcattctcatataacaagattctattatgaagctatacacttacttatacaataaacaatatgaagaaaaacatgaaatctagttccatactgttgggcagactttttctgctgggggcggtttgcagctgtacccagacggcaccggactatgcgtcttacgtcaatccgttcatcggtacgggcggacatgggcatacctatcccggagcggtagttcccaacggaatgattcagcccagccccgacacgcgtatctacgagtgggatgcctgctccggatattactatgcagatactactatcaacggattttcacatactcacgtcagcggtacgggttgtgccgattacggggatgtgttgctgatgcccactgtagggcggcaggattaccactctatgggctcgaagagccagcagatggcgtacgcctctgccttttcccacgagaatgaaacagccgaaccgggatattattccgtatttttggaccgctacggggtgaaagccgaactgacctctaccaaacgtgcggcgattcatcgctataccttcccgaaagcggaagatgcaggctttatcctcgacttggattatagcattcagcgccagaagaatgaacagatggagctggaagtaatcagcgatactgaaatccgtggacgcaagaagactgtatattgggctttcgaccagtatatcaacttctacgccaagttctccaaaccatttacctatacgctggtcacggactccatggcattggacgaaggcggtccgcttctgcctacagctaaagctttactgcaattccagacggagcccaatgaggaggtattggtaaaggtaggtgtgtctgccgtggatatggacggtgcccgcaagaatgtggaagccgaaatctccggatgggattttgacggtgtgcgccgtgctgcccgccagcagtggaacacttatctctccaagattgacatcgatacgaaggacaacgaccagcgtaccatgttctacacggcactttaccacacgggcatgcagcccaacttatttaccgatgccgacggacgttactttggtatggacttgaagccccatcaaggcagggtggacgagcctgtctacaccattttctctttatgggacactttccgtgcctatcatccgctgatgacgattattgatcctgaactgaacgaggctttcatccgttcgctcatccagaagtcccgcgagggcggcgtcctgcctatgtgggaactggccggaaactatacgggtaccatgattggttatcatgcagcttccctcatagcggattcgtatgtaaagggataccgtaacttcgacgtgcaggaggcctataaggcttgcctccgtacggcagaatacgatacgacgggcattatcacgcatcctttggttgtgccgcatctgatgccgcaggccaagtactggaagaacaagattggctacgtgccttgcgacaaagacaatgagtccgtggcaaaagcactggagtatgcttacgatgactggtgcatctctgtactggcaggtgccttggacgacgaagtcaaccgcgacaagtatgctgcctttgccgagggatataaagtttatttcgatccgagtacccgtttcatgcgtggactggacagtgagggcaactggcgtacgcctttcaacccccgcgcatccaatcaccgtaacgatgactattgcgaaggcactgcctggcagtggacttggttcgttccccacgatgtagacggattggtagaactgatgggaggacgcgacgctttcatcggcaagttggattctctgttcactgccgattccaagctggaaggtgaatcgacttcggtggatatttccggtctgataggccagtatgctcacggcaatgagccgagccatcacattgcccatctctacaactacgtaggccagccctggcgtacgcaggagattgtggatgaggtgctgcatacgctttacttcaacaaccccgacggactttcgggcaatgaagactgcggacagatgtctgcatggtacattctgaatgcgatgggcttctatcaggtatgccccggcaagtcggtatattccatcggacgcccgctgttcaacgaggcgaccgttcatctgaaagacggcaagtcgttcaaggtgatagcccacaacaatagccgcgataacaagtatgtgcagagcattgtgctgaacggcaataagctggagactccattcttcacgcatcaggatatagtggacggcggtacactggaactgactatgggcagcgaaccgctgaagccggaagagtaaatggattattatgctcacaagattccctgatgagcaatacctttaataaggtggagtcctaccgggaaatgaatagcagcagcaacggcatgtattcttttagctcgttgcgcagaaattccaatgttttttgtttatagcggttgactgacttcacactaaggttcagctcttccgctatttctgtatgcgtttttcccttgaagaagctctcgatgaagacaatgcggtagctctcgggaagcttgttcagggtaccgtacagcatccggtacatttcgtctaaggtatatacactgtccggttccgtttcgtagacaggggttttctttttgacgacttccgcataattccattcatattcctgatgcttcaggtagttcaggcaattgttcctcacgcacatcttgaggtaacccaatatcgttttcgggtctatctcgaagttgtccatgttgttccatagggaggcgaatacttcggaaacaatgtcttcgcgagtctctttattgtcaacaaaacgcttggcatacaagcagaagggggcatagtactcctcgtagagctgcttgaatacttgtttcttgctttgttcattaagagatagtttcataatatatctacagtatttcgaaggcaaatatacaataagaaagtcaaataaaaggttctttttgaaatttaaaagaacaaagctgtggcaataggcaagtagtattttgctattaaggacccaattgaaaaaactttgttttagctgtccctttttgatttcccgattgtattatctatgtaattgcaattataaataggttataaggtttagagattatggaaaaattagattcggatttattgtttcggaaagcacaagcattgggagatgatatccgggaaatggaatcaattgatgtggccaaagcttttgaacggacacagcagttgataaggaaaaagcggggtaggcagatgtatgatagcttgatgcgctatgccgcattcttgacgttacctttgctgatgatttcgctgacgttgggctacttatatttcagtggaccggaagcggtagactgctacgccgaagtcacggctgccaaaggttcggtcatccgttatgagcttcctgaccattcggtggcgtggctcaatgcgggaagtaccttgcgttatcccatagttttcaggaaagacaatcggagcgtggaactgaaaggggaagcgtattttgaagtgcaggccgacaagaaacgtcctttttatgtgaacacaccggatggattgagtgtatatgtatacggaacgaagttcaacgtggctgcctacgaggatgaagaacttattggtacggtgttggagaaaggtaaggtaaatgtgataacccccaatcaggagacaatggaattgttacccggagagcagttgctttacaatcggaacagtcggaaatggattaaaaataaagtggatgtctacgagaaggtggcttggaaagacggaaagctgattttcaggaatgcgacgttggaagagatattcaaaaggctttcaaggcatttcaatgtggatattgagtttgacaataggttgggaaaggaatacaagtaccgggcgactttccacaaagagaccttgcagcagattttggattatctggcaaagtcggcagccttgaagtggagggtggaagatgctgcgcagcaggcagacgatacccttacgaaggctaggattatagtaaacttatattagtaacccttaaaaccataaagagcctatgatatagcataagaagagcaaaaacaaaaaaggaagaaaactgtccccacagctttcttccctactcattaaaaaactcacggattttggtttagcagacaagaagccgtgaatcaaaccttagttcatttagtaataaactttagttaaccgcaaatgtatgaaaaataatcattcatttagtgcagtatgccttaaatataccttaaaattaaaacttcctttacctatgaggataagtctaatactactttttgctgttgtattacagcttcctgccagtaacgggtacgcccagcggatgcgaggctccttttctatgtcgagtgtttccatagaaaatgtattgaataagatagaggagaactccgactatgtgttcctctataataacaagacgattcaggcagaccgcattgtttcggtaaacagccggtcgggaaagataacagagatcctggatgacatgttccgtggaacaaatgtcacttatacattggtagacaatcagataatcttgtccacgaaacagataaagcaacaagaacccaaaatcaaggtggacggcgtggtcaaggatgctaccggcgaaccgctgattggcgtcaacgtgaaggtgaagaataccattgccggtaccattactgatttggacggcaagttcaacttggcggtaaacaagggggacgttctcgaaatctcttatgtgggatatactactaaggaaatcaagataatagacgatcgaatcctgaatgtgctgttggaagaagattcgcagaagctgaacgaggtagtggtcactgccctgggtatcaagcgtgccgagaaagcgttgagctacaacgtgcagcaggtgaaacaagacgagctggtccgtgtgaaggatgctaacttcgtgaactcgctgagcggaaagattgccggtgtaagcatcaacaagagtgctagcggcgtgggaggagctacccgcgtggtgatgcgtggagccaagtccatcgagggcgataacaatgcactctacgtggtggacggtatccctttgttcaacaccaatatggggaatacggacagcggtatcatgggtgagggcaaggccggaacggaaggtattgctgacttcaaccccgaagacatcgaaagcctctccgtgttgagcggcccttcggcagccgccttgtacggtagcagcgccgccaacggggtgattctgattactaccaaaaagggcaaggaaggaaaactttccgtccagttctcttcttccacggagtttagcaaagcctacatgacaccggagttccagagcacctacggcaataaaaaggacatgtacgaaagctggggagaaaagctggctaccccttctgcctacgatccgaaggacgacttcttcaataccggaaccaacttcatcaactcgttgacattgaccacgggcaccaagcagaaccagacgttcgcgtccgtatcatccaccaactcggccggtattgtgcccaataactcttacgaccgtctgaacttcactatccgcaacactgccaccttcttcaaggataaactgcaactcgacctgggcgcgtcgtatgtgaagcagaaagaccgcaacatggtgtcgcaaggacagtactggaatccggtgatggctgcctacctcttcccgcggggagaaaactttgaagacatcaagacttttgagcgttatgatgacagccgtaagtttcccgtacaatactggccggtgtccgaacctacctacgcttcgcagaacccttactggactgcctaccgcaatgtggctaccaacgagaagagccgctacatgttcaacgtggggctgacctacaagattaccgactggctgaacgccgccgcacgcttccgcatggacgatacgcatgtgctcttcgaacgcaagatttacgccacttccgaccagaagtttgccgagggaaagaaaggacattatggctacagcaactataacgaccgccaagaatacgccgacttcatgctgaatgtcaacaagcatatccgggacttcagcattgctgctaacttgggctggagctattctaactattggctattggagagaggatataaaggaacattgagcctggtacccaataaattcgtggcagtcaacatcgacccggccaatggacgtgtctccgaaaagggcggtgatagccgcgtgcgcaaccatgccgtctttgccaatgtggaattaggctggaagagtatgctttacttgacgctgaccggacgtaacgactggaactcccgtctggtgaacaccgacgaagagtccttcttctatccttccgtaggtttgtcggccatcatttccgaaatggtagatttgccccggttcatttcttacttgaaggtacgtggttcctttaccgaagtgggcgctccaatttcccgttccggtctgactcccggtacggtgacaactcccattgacggcggtacggtgaagcctacctatatctatccgtttaccgacttcaaggcagagcgtacccgttcgtatgaattcggtttaagtttgcgtttgtggaacaagttgagtgcagaagtcacttactaccattccaataccaagaaccagactttcttgggtaacttgcctgaatttaccggttacaagcagatttacttgcaggccggtaatgtggagaaccgcggatgggaagcctctttgggttacaatgacaagctgaagaacggactggcattctcctccacattgacattttcgcgtaacgtcaacagaattaaagaaatggtggatggttaccatactgatttgttggacgatcccatccagatttctgaagttgtgaaagatggcggacgtatcattttgaggaaaggtggcagcattcacgacatttacgccaataccttcttgaagaaagatcatcagggttatgtagagataaagagtgacggtacgtttgaactggataatagcggtaagcccgtctatttgggcaagacttcccccgacttcaatatgggatggaacaactccttgtcgtacaaaggactcggactcagcttcctgctcaacggacgtttcggaggtgtggttacctcctctaccgaagcattgctcgaccgtttcggcgtgtcgaagcgttcggccgaggcacgtgacaatggcggtgcattattgccgggacagggcagggtagatgcaaagacctactaccagatgattggtacaggaggttacgagacctccggctactatgtctacagcgctaccaacatccgtttgcaggagttgacactcagctacaccatgcccaaccgctggtttggcaacgtactgaaggacgtgacggtttccttcattgccaacaatccctggatgttgtactgcgaggctccgttcgaccccgaactgactccctctaccgccacctacggacaaggcaacgattactttatgcagccaagtgtgcgtagctttggctttggtattaaattcaaattataacagaccgacttttaatatgaaaaagataaatcaatataagcttttagcgggaatatatgccctagcattgttggcatcctgcgattacgaggaaatcaataccaattgggctgaaatgaacgagaaggaagaagccatggacggtgttgccgtcggaggattggtgacaacgatggagcagaccgtcttcccggtagggacacaagccgacgatacggacatcatcaacatgtaccagaccgactatcatctgtctgccgactgctggagtggattcttctcacaaaacaactcttggaacggtggtaacaacaataccagttattatttgattgacggatggattaagggtacttatgcacgttcttataccaatgcactcgacccgtggaaaaaattgaaagccgcttctgaaaagaacgacactcccgaagtctttgccttggcacaagtattgaagatttctgcttggcacaaggcgttggagagtttcgggccgatgccttattcacatgcagccgatgctacgatgaacattcctttcgacttggagaaggacatatatgctgccatgttcaaagacttggccgatgctgtggaggttttgaccaagaaagcggatgccggggtgaccattatgggagattatgatgcggtttatgcgggtgactctaggaaatgggtgaagtatgccaattcgctgatgcttcgtctggcgatgcgcgtacgttttgccgatgccgaactggcaaagcggtatgcggctttggccgtgaaacactccatcggagtgatgacctccaaagacgaagaggcgcagatgagttcgggtgcgggcatcactttccgcaacaacatcgagtggttggccgagcagtacaatgaatcgcgcatggggtcgtccatgttctcttacctgatgggttacgaagacccacgtctgagcgcttacttcaaaccggtggatgacaaatgtactttgggacagttggcattcgatggcaagaaatatcaagccattcctgccgggcatctttacgggcagaacgatgtctatacgacattctcaaagccgaatatcaaaggtgacactccgacctattggatgcgtgcttccgaagtctatttcttacgtgctgaagctgctttggtgtggggaggtgaattcggtaatgccgacgaactctacaagcaaggtattgggatgtcgttccaggaaaacggggtgacagcttcggtcgatgattacatgaactccggcaatgtaccaatcaagcatgagttcggtggttcttactcttgcagtttttccgcccctcgtgccgttacagtcaagtttgaaggcagccgggaagaaaaattggagaagattattatccagaagtggcttgcgctctttcccaacggtcaagaggcttggacggagtggagaagaactggctatcccgacttgaatccggtgatggcaaacagaggttcgttccaaggagccaccattgaaaaaggagtgcgccgaatgatttatccgaccagtttccatcagacaacggaggacgaggccaactatcaggccatcctgaagttgctcaataatgggaagggtggtgaagacaaatcttctacccgtctgtggtgggattgcaagtgataaacgatgtcttacgttagaaataagaaaaatatgaaaaaattgaagaaactattatatattgttccgttgcttggtttgatggctactgcctgcacggatattgagagcattgagatagatcatatcggtggtaacaataccaaagatgacgtggagagcgaagcgtactatgccgacttgcgcgcgtataaagaaaccgccaagaattatggccgccccgttgcgttcggctggttttccaactgggcgccgacgggagccatgcggagggggtatctcacttctgtgcccgatagtatggatatcatatctatgtggagcggtgccccaggacgttatgaaatcactgaggcgcagaagaaagacaaggagtttgtgcaaaaagtgaaaggcatcaggttattggaagtctgcctgctttcacacttgggcaaagggcgcacccctacttcggtatacgatgaagtggaaaaaaaagccatagaagagggttggagcgaagctaagctgacagaagaaagaaagtttgctcgctgggacttctgggggtttacttcgcatgacttgaacaacaaggaagagctggaacgggctctttccaaatttgccaaagccatctgtgactcgttggtgaccggcgagtgggacggatatgatatcgactgggaaccgggtaacggtttcaatgattccgacggtactatcggcagccgtaacatcggtttcgtggtgaaagagttgggcaaatacatcggtcctaagagcgacccggagaacaaagggcataaactgctatgcatcgacgggcatatcaatgatttcttgcctgagatagaagattatgtggattactggatagctcaggcgtatgggcaagcttctccttatttgcattcgcctggcaatatcaatgagaaactcattgtcacggagaacttcgaatcgtttgcttccaatggagggcaattgttgaaacaggccgcctggatgccggaagaagggtataaaggcggtgtgggagcttatcgctttgataatgactatgacaatgcacccgattataaatggatgcgtcaagccatacagattaatcagcgtgtgttcaacgaatggaaagaaagcaaaggaaaaaataagtagtgaatcaaattttagaatatgaaagatatgaataaatatttgttgaaatatatggtgttttgcttcatagccatgctgtcggtcagttgcaatgatagcgaaagtgatttgctggaacctaaggtctattttgaagaaagggagtaccggatagaggtggaagagggcgaagcgatgacccatgagttgcgggcacgtgtgtcatccttgtgtgcttcgcaggtagaggtgtcttatgaagtggccgatacttctgtaattgaggcttataacaaaaagtatggaacggaatatgagatgttcgatgctactgccgtagatttgggaaatgctgttgccactgttccttccggagaggtgtatgccggatcggtatcggtgaaattttctaagttggataaggtggaagaaggtaagtcttatctgcttccggtgcgtgtacggtctgcttctctaccggtttcccaagggggagatgtggtttattttatcctccacaagcccgtgcggattatgaaggtggctcgtgtgtataacaattatgtgaggatacctttgcttcccggtacccaattcacatccgttacttacgaagcattgatttatattgatttctttggaaacaacaatactgttatgggatgcgagggaactctgattttccgtatcggtgatgcacctttgctggagaaagaccatttgcagattgcaggcaaatcggaatacagcgtttctcaggctttgggaaccgggaaatggtatcacgtggcgttcacttacaatcagcctaccggcaagactgccatcttcatcaatggagaaaaagcttccgaagcggtttgggatattccgagcttcgatttcggtaagggcgacttctttatcggtaaggtggccggattcatgtggggcgaacgtccgttctatggtcgcatgagcgaagtcagactttggaatgtgtcgcgcacggagagtcaaatcaaggaaaacatgattacggttgacccgaaatcggaaggccttgctgcttattataagttgaacggaaccgaccagttccaagacggagagacgtggaaagtgaaagatgcttccggtcatggaatggacggattggtgaatggaggcgataaagccctcggcatcgtggaattggatgaaccgataactattaaatagcaggattccggtttggatatgaatgcaagttcttgcaactaccaattacaagaacttgcattctttcttttaccgacatgtctttattctttatccttctattctgctaattaaaattaaaaaataatctgcagtattagtgtttttgccgagtgaattgttttattaaccaataaaaggcaaaagaatgtgtctcaataaacttaaatttaggatgaaaaacatgaaatctattgcatggcaagccggatgtctcttgtggttgggcatggcggtatgcaactgtactccggcttcttcaggggaagactatgcatcttacgtaaatccgtttatcggtacgggggggcacggacatacctatccgggcgcagtggtacccaacgggatgattcagccgagccccgacacgcgcatctttcagtgggatgcttgttccggttattactatgccgattccaccattaacggattctcgcacacgcacctcagtggaacgggttgcggtgattatggcgatgtgctgctgatgcccaccgtgggccgtcaggactatcatgcgatggggaagaagagccagcaaatggcatacgcctcgcctttctcgcacgggcgggagaaggcagaaccgggatattattccgtattcctcaaccgttatggcgtacaagccgagttgacctctaccaagcgcgccgccattcatcgctacacgtttcccaagtctgggaaagcaggatttatccttgaccttgactacagcctccagcgtcagaagaatgaagagatgaagctggaagtcatcagtgatacagaaatccgcggacataagaaaaccgtttactgggctttcgatcaatacataaacttctatgccaagttctccaaaccgtttacttatacaatggtgaccgattccatggcattggatgaaggggaaccgctgctgcccaccgccaaggtgctattgcaattccagacggagaaggatgagcaggtgatggtgaaggtgggtgtttcagctgtggatatggacggtgcccgccggaatgtggaagcggagatacccggatgggattttgacggagtgcgtcgggcagcccgccaatcatggaatgaataccttgccaagatagatatcgagacggaggatgaagaccagcgtaccatgttctatacggcgctttatcatacgggtatgcagcccaatctgtttaccgatgccgacgggcgttattttggcatggatttgaaagtgcatcagggtagcgtggaagagcccgtctataccattttctctttgtgggacacgttccgtgcctaccacccgttgatgacgattatcaatccggatttgaaccaagccttcatccgctcgctcatccagaaggagcgcgaaggcggtgtatttcccatgtgggaattggcgggcaactatacgggcacgatgataggctatcatgctgcctcccttgtggcagatgcctatatgaagggctatcgcgactttgatgtacagaaggcataccgcgcttgcctgcgtgtggcggagtatgacactactggtattatcacccatcctttggtattgcctcatttgatgccgcaggccaaatattggaagaacaaggtcggttacgtgccttgcgacaaggataatgaagcagtagctaaggccttggagtatgcctacgatgactggtgcatctctgtgctggccggtgagttgggcgacacgctgaaccaacggaagtatgctgatttcagcaagggctatcagaactatttcgatccagttacccgttttatgcgtggactggatagcaaaggcaattggcgtacgccgttcaatccccgctcttccaaccatcgcagtgatgactattgtgaggggactgcctggcaatggacctggtttgttcctcacgatgtggagggactggtggaactgatgggaggccgtgaagcttttatcggtaagttggactcgctgttcgtggccgattcttcactggaaggtgaactagtgtctgccgacatttccggcctgatagggcagtatgcccatggtaatgagccgagtcaccatatcattcacttctacaactatgtgggccaaccctggcgcacgcaggagttggtggacgaggtactgcagacgctttatttcaacaatccgaacgggctttcgggtaatgaagactgtgggcagatgtcggcatggtatgtactgaatgccatgggcttctaccaagtttgcccaggccgtccgctctattccatcggtcgcccgttgttcgacaaggcgacagtgaaccttaaggatggaaagaaattcacggtggtggccacggacaacagtcgtacgaacaagtatgttcagaagatgttgttgaacggcgaggaattggtacgcccgttctttacgcatcaggacataacggacggtggcactttggagttgataatgggcgacaagccggtaaagacaaacaattgataacgtgcgattagttatgaatcacaataattaccgtaacccggtttcctgggtgccttccgtttattttgccatggggctgcctttcattgcagtcaacctggtctctacgttcatgtttaaggatttgggcatatccgacacgcagattgccttctggacttctatcatcatgatgccctggacgttgaagttcctttggagtccgttcctggagatgtaccgcacaaagaagttctttgtggttatcacccagttgttgagcggattgctgttcggactggtggctttttcgttgaagttcgattacttttttgccattagtatttcgacaatggcagtcatcgctttcagcggagccacgcacgatatagcctgcgatggcgtgtatatggcggaactgtcacctgccgaccaagccaagtacatcggtgtgcagggggctttctacaacatcgccaaattggtggcgaacggcggactggtggcgatggcgggtatgctggcccagagtttcggggcgatggaaggccgttctatgcaggagaacatgtctgcttataaggaagcgtggatgattatctttatcgtcattgccgtgttgctgttgctgttgggggggtatcattcacggatgttgccgtgcacgcagaagcggcaggacgccaagcgttcgggcgcggaggtgatgcgggaactgtgggcggtgataaggaatttcttcacaaagcgccacatcttctattacatttgcttcattatcctctaccgctttgctgaagggcttgtgatgaagattgcaccgctcttcttgcgctcctcgcgtgaggtggggggattggggctttcgcttactgaaatcggtacgttgaacggtgtcttcggttcagcggcttttgtgctgggatccttgttggcaggcatctacgtgtcgaagcgcgggctgaagaagacgctgttttcgctctgcatcgtgttcaactttccgttcgtggcctacacgctactcgccatttatcaaccggagaacctttatctgataggtgcgggcatcgtggcggagtatttcggttacggcttcggcttcgtggggctgacgttgttcatgatgcagcagattgctcccggcaagcatcagatgtcacactacgcctttgcttccggcatcatgaatttgggagtgatgcttccggggatgatgagtggtttctttagtgatttgttggggtacgagaagttcttcacttacgtgctgttggccgccgtaccgtcgttgctgataacatacttcattccctttacgcatgacgatgaggtgaagtaagctttgcagcatgaatgagacttgttgcataaaaaactattgaataaaagaatataatctgtgcccatctgtgtaatctgtggtgcaaagataaaaatccaaaatattatgaacaataaatttacttcaatcccttgggaagagcgtccggcagattgtgcggacgtgatgtggcgttattcgcagaatcccgttatcggacgttaccatattccgacgtccaacagtatcttcaatagtgcagtggtgccttttggcgacggatttgccggtgtgttccgttgtgacaaccgggcggtgcagatgaatatttttgccggtttcagcaaggacggcatccactgggaaatagagcatgagccaatcaagttcaaggccgggaatacggacatgatagagtccgaatataaatacgacccgcgcgtgacatggattgaggatcgctactggattacgtggtgcaacggctactacggtcccaccatcggtatcggctatactttcgatttcaaggagttcttccagtgcgagaatgctttcttgcctttcaatcgcaacggtgtattgttgcctcagaggttcgatggcaaatatgcactcttgagccgtcccagcgacagtggccatacaccttttggcgacatctacatcagcttcagccccgacatgaagttctggggcgaacaccgccatgtgatggctcccacacctttccccgaaagtgcctggcaatgcaccaagataggggcgggttcggtaccgttcctcacggacgaaggttggctgatgttctatcacggcgtgataaccacttgcaacggtttccgttactccatgggggcggctattctggataaggacaatcctgccaagttgctctaccgcacccgtgagtatctgcttgcgcctgctgctccatacgaactggcaggcgatgtacccaatgtggtgttcccttgcgcagcattgcaggatggagaacgtgtagctgtatactacggtgcagccgatacggtagtggggcttgcctttggctatatccgcgagattctggagttcacgaagcgcacaagtattttgtaagcaccaagcagttggcaggcgcttggtattgctgaaaaaaacgtctgccgtaactgtcttatacttagtgaaatatcactgcaaagatactgcatgctttttgcagtgatactgcagagccgttgcagcgccactgcaaagccgttgcagcgccactgcaaagctgatgcagcgttactgcaaagctgttgcagcgctactgcaaagtagtttgcagtgtcactgcagaccgtttgcagtaacgctgcagagtgcatgcaatgacaccggcatgggtagcgtgctcactaactaataaagaacaaatccctactatattatgaaacgactgattactttctgtatcatctcctttggaatgctcacggcatctatggctgcggagaagcaaccgacggactatgtgaatccttttattggtaccaccaacttcggcactacaaatccgggagccgtctgtcccaatggaatgatgtccgtagtgcccttcaacgtgatgggctcggaggacaacaaatacgataaagatgcccgctggtggtccactccctatgagtatcacaattgtttcttcaccggatattcgcatgtcaatttgagcggtgtgggctgtccggaattgggttctttgctgctgatgcccactacgggagagttgtccgtggattataaggagtatggaagccgctataaggacgagcaggcatcccccggatattacagcaacttcctgacccgctacaatgtgaagacggaagtgacggcaactccccgcacgggtgtggcgcgtttcacctttcctgctgggcaaagccatgtactgctgaatctgggcgaaggtctgaccaatgaatcgggagcttttctgcgtcggacgggtgagtgcgagtttgaaggtatgaagctgctgggtactttctgctataatccgcaggccgttttccccatctactttgtgatgcgtgtcaacaagcagcctgctgcttcgggctactggaagaagcagcgccccatgaccggtgtagaggccgaatgggaccccgataacggacgctacaaactttacacccgctaccagaaggaactggcgggagatgatatcggcgcctatcttacattcgataccgaagaaggcgagcaggtggaagtacagatgggagtctcttttgtgagcatggagaatgcccgcctcaatctggataccgagcagcagggaaagaacttcggtcaagtgctggaggaagcccgtcgccgctggaacgatgacctttcgcgcatccttgtagaaggaggtacggaggaacagaaaaccgttttttatacggcactctatcatacgctgatacatcccaatatcctgcaagatgtgaacggggaatatcccgctatggagagtgataagattttgactacccaaggcgaccgttataccgtcttttctttgtgggacacttaccgcaatgtgcaccagcttcttacgctggtatatcccgaacgacaattgcagatggtgcgttccatgctcgacatgtaccgcgaacacggctggcttcccaaatgggaactctacggacgtgagacgctgaccatggaaggtgacccttccattcccgtcatcgtcgacacctggctgaaaggtctgcgcgactttgatatagaactggcctacgaggccatgtgcaagggagccaccctgccgggagcggagaatctgctccgtccggacaatgacgactacgtatcattgggatatgtgcccctgcgggagcagtatgacaattccgtttcgcatgccctggaatactatattgccgacaatgccttgtcgcgcatagccgctgcgcttggcaagaaggaggatgcccgtctgttccacgaacgttcgctgggctacaagcattattactgtaaggagtacggtactttccgtcctatcctgcctaacggtgaattctatgctcctttcgacccgaggcagggagagaactttgagccgaaccccggatttcacgaaggttgtgcctggaactatactttctatgttccccacgatgtgaaagggcttgcccggctcatgggtggaaagaagccgttcgtagacaagcttcagcgtgtgttcgacgaaggactgtacgaccctgccaacgaaccggacattgcatacgcccatcttttttcttatttcaagggtgaggagtggcgcacgcagaaagagctgcaccgccttttgcagaagtatttcaagaatgcccccgacggaattcccggcaatgatgataccggaacgatgtccgcttgggctatcttcaatatgatgggcttttatccggattgtcccggagaaccggcttatacgctgtctactccggtatttgataaggtgaccataaagctcgaccctaagtattggggacgcgaccaactggtgatagagacggaacgcccgtcggcagagtcgctttatatccgtgaaatggaactgggaggaaaaaaactgtcccgatatcgtatcactcatgaagaactggtgcagagtggaaaactgcgatttagtcttcgataggtattgtgagtcaggatagcatcggtgatggtttaggttgcccgtcgttgacagagttcatgtcagtggcgggcttttctatgcaggttggcttccggtaggttgatagggtatttcgaaccagaattcggaacctttccccggaatagagctgacgcccacttttccgttcattttctcggcaatcatggtgcagatggagagtccgagacccgtgccttgtttaaaactgtttagcttgacaaagcgttcgaatacatccttttgcttttcaggaggaatgccgcaaccggtatcacggacaaagaagcgaatcctgtcttcttgcggcaggtgataaccaatgtcgatgaaaccttcttccgtatgcttgagggcgtttgacagatagttgttcagtacttgtcttacccgtttggggactgtgtgaataatacagtaatccgcaccgggcaggagacgtatactgacttcggacggaagtttcagttttgccatcgtctgcatttcatcaagcgtcttgtttacatccatatctccttctgtgaattcgagaatgccagcttcgatgcgtgacaggtcgagaatatcattaatcagttgcagcagcagttgggtgttttcttcgatgatatgtatgtattcctttgtatcttcgtcttgtatataatcggaaagtatggaggagaatccgacgatggcgtttagcggagtacgtatctcgtggctcatgttggcgagaaaagccgatttcaggcggttggcttcttctgctttctctttggctgccagcagttcggtgatgtccagtgcagaactgacaatccacctctctttccctttgttgtaggacaccagcgttttgtgaaacgacagaatatactctctgcctttgggattgacaaagtgtttgatgtaggactggggagtttccgactcttcaacttctttgtctgtctcttggatgaaattatcttgcattaggggtttgaactcctcttcatagtgtcccacaatatcctcagcggggacttccatcatctctgccgcttttttgttccatatcaggtaacgtccttcatcgtttttatcttttactgtagtggcgatgggaaggttctccagaatactttcaaggaagaaacggtatttttcgttttcccggcgttggacttcatcttccgtaatgtcgcgtatgaaggctatgacataatttctgttgaggtagaccatgcgcactgcgatatatagtttctcaccactttctattcttatctttagggtcaggctgtccgaagtgcgggtattcagtacgcgtaacagcgacgtcatgtatttccggcattcatcggcgtctgtcactaaattattgatatttagaactcccggattcaggaacggaagtctgtttgccttttcggtaggtgtattaagtagttttacgacaaaaccttgtctgttcagcagatataccggaatgtctattgcccggataatctgcctgttcagacttttgtatttataatttatccagtatagaaagcttgcagatgtagcggcaatcaacagaaataactgtatttctccaaataatgtaagatgcatacgcggtgtctttcatttcgtctgtccccgttgacgaaggttattatataaaaagcgcgaggactgttattgcctatctgcattcgaggctctggaaaatgcccacgtcataaatagacaacagtccccacgcctaagtatataataacatagacgtgaagaaactgttgctatcatcccatgacgtttattgaattttccagattccgaataggcagggataataactttcgcttcttgcgttcttatcgaatcaagtcaaaaatggccgttatcactataactgccaagactttggtgcaaaagtagtatattttttgggatgtacggtatgatgaggagaataaagtgtatatgcaaacaaagcgtgatggtatttgaccgtcacgctttgtatagcttgccattaaaaattgttagagagaattgttagaggatttatttcatggcttctatagtgtatccttgttgcttcagaaggttcaacactccattgtctccgggcaggtgtccggcgccgactacgaaaagggtaggggcttctgtcatgatagcaggcatcttttcaacccatgccttgttgcggttgtccagcatggcttccatctctccgggcagcgggtcgcatgaattgccgtcgcgctcttccatcagttgcagcatggcatccaggtcctgcttttcataagcggcaatcaggcgcttgctttgctcgatacctttctcgatgtcactgatagcgcagtagaggaggtttgcctggcgttgcagcgtctggctgttgaacagaatgtctatttgtgactgggctgtttccagaccgccaactttcttgccttgctgtccggcctgctgctggaagtaagtgtcgagctgttcttgcgggttgaagcccggagtatgtttcatgtagagcaggacgacaagctgctggttgatggcagccggtttcagttgagcaagcatggcgatgtctaccatcatattctcttttacaactttacccacttcttcgtattgctcgggagtaaagaggttttgcagcgtggtgtctttgggcatcatcatctgctgttgcatgctttgcatgaaggcgggagtcgccatttcgctcatcacgacctcaccgtagacttgggtggtttcgttcatggcctgcggcatggcggcgatgctgtccttgatgctgagtggagagagatggtaagtaccgaaaatataggatggtttctctaatcctttaccggatactttccataaaagttgtgcattggcactcagcgcaatgctgatgaataagaggatgcctaaaagtttcttcattgctttcttcttttaattgtttctggactatcagtcgggaaagagtaaagaaaatcacaagaaggggaaaaattagtatcattttattcttcctccgcagagccagtgttgggtgtaatatttttcccggaggttgctgactatgactccctggctggtactggcatggataaacttgccgtccttgaggtaaatacccacatgggctacttttttgcgggaagcacggctggtgaagaacaccaaatctccctcacgcaagttgcggcgggagattttgctgctctctttcagttgcccgtctgtgcttctcgacagacgggtgtgataaactttcttatacagttgcgataccagtccggagcagtccgttccacgcttgctgtcaccgcctgcacgatagggggtgcctatccattcggaggcatggatgtacagcttgtggttgtcctgcagttcaatatccactcccaaacggacggatgcctgtgccagggctttgtagtccaggcgtggcgcggaggtatggcaggaacttagacctatcaatatgatggtaagagctactatataagaaagatattttttcatgcttccgcgtttttttcttctaccgttttttcttctttttccgttatttcttctacggcttcttcttctaccgtttcttctactacggcttcttcctccacgccgacgttgaagtaagcttccagttcctgctcggcagagttgttctcatttcgtatatcgcggataataacaccgttttccagcaatgcaatacgcgggcaaacgtccactgtatgatttaggttatggctggaaatgatgacggtggctccgtgttcttcattgtatcttttcagcaagtgtttgattacggactgtgaactggggtcaaggaagttgaacggttcatccagaatcaacagttgcgggtgatgtagcatagcggagatgatgccgattttctgcttgtttccggcagaatagttgcggatgaatttcttctggcccattacctcgccgttcatgaagcgttcgaagggaagcaggcgttcgtctacttcctctttcttcagaccatacatcttaccgatgaagtagaagtattcttcgggggtgaggtagtctatcaggaaaccgtcgtctataaaggctcccgtgaagttcttccagtcctcacttttgctgacgtcaatgtcattgatggttacattgccccggtctgcctgcagcaagtcaagaatcagacggaagagggtggtcttgcctgcaccgttgttgcctaccagtcccagcatatcgccttgcccgatggtgtagttctctatatctacggctttttttgtgccgaaattcttttgtaaattgttgatgcgtatcatgttagtgattgatgtttaatgatttctatttctgtctactgtccctgaagccttccatattcttgtagcggcgtttcatgagccggtgatatacattcatcagccagaatttggaagtggcgataaatgccacgccgatgccgataagtatccagggggtgacctctttgccaaagatggcattcagtgcaaaaagcagcagtaaaggtatgccgaaagcacctcctgaaatcagattctgcagaccggtgcctatattctgccggctggtcatctttgaattcaggtcggtagtcttgttgttgtagactgccagttggaacagacagcagtatacggctcccggaatgaatatcagccatgcaatgcaaccgagtacggataccttcccggtaaccataccgggaatcatcagaatcgtaggaatgagcaatgcaatgctgtacagtatgtatttggcacgcagcagcgagtagatagattccttgcggctcatcagtccgtcaatgtaattgccttcgtaacccatcagtgtgctgaggaacatgatgccgaagataatgtaattataaaggacgaagaaatctctcagacctccgtcatacacatcggaaaagctaatgatactactgaacattatcactacaccggtgatggaatagagcgaacgcttacaaatcttgttgcgtagcaataacttgagttccagtctcatgtattcgcctatttcgccgtagcggtcgaggaatttgtattcggatacatgttttatccgtgtatcttccactttgttcagttcattgtagatgagtttctgcatcagggtgcggttgatgaaccacatgagggcgatggcagccagtacaccgatgaatgacagtatattaccggtgatgaacccttctcccagattgacaaaacagtcgaaaagcggactgttgtccggaatgaatagtgcggcggcaatgccaccatatactactaccggtaatgccagccaccagatgcgctcacccatcagtgtgcggcacaacaagaaccagtagttattgaataccatcagcagccagatgccaatgcaataggtcagcacaccactgattccatagaatttggtgacggtgatgatggaaaacggaacaaacagaaacagccagaacagattgaagccatccagtccggaacggatcagcaggaagtctataagacgattctgtttgatgggaagcagtaggtagggcttcacttcctgggtgggtgttttttggaaaggcaggcgtatcaggaaatccagcacaaggacaaatatcaatccggagttcattacgtgataggcttctgtggcaccgccgtcaaaggcgaatgcaaaggtcgtaccgaagaatatcaggtaaccggcccagaagacaaacatgaagtacatccagaattttccgaatttacttttttcgtacatcggatttcgtttttctgccagttttccgtgcttgcgcaaatctaagaaaagactcatagtatttgtatatatagagtttgtataaaaaaagctgcgctgcctttcatcgaacaacgcagccttctgtgtgtatggctctcttattctttgtcaggagtttcaggactgatcattgatacctcaatctcgttcttctgcttgaacaagtcgtcggtgaacttctggatgtccttcacggtgatgctgttgacaatctgttcgtaatcctttatcggattcataccggtgaacaggtattcgtcaatgcttcccagccagtagctgttctccttcaagtcttcggcatgtttcttcagcatgaactccttcactttattcaagtctccttccgacggacctgctttggcgatgttgtcgagttctgcaaagataatctgcatcagcttttctctttttgccggagcggtttcgaatacaatctgcaagagagccttttctttcggatatttgcttaattggccgcctacatatacaccgtaagtgcccccttcgtcttcacgtaccttggctgtataaaccaagtcgagaatctggctggtcatactcagcaggatgtcatttttcaggtcgtacttgcagtcaccgttcagcaggacaaagttcgacgctttggcagtttcctgcttccgtacgaattcgttcttataaactccctggcgcatgtccactttattgtccttgaatgtttccttgcggttgatggcaggcagtgaacccaggtactcggcgatgagtggtttcatttcctccacattcacatttcctacaaagataaaggtaaaatcgctggcatctttgtagcggtcttgatacatggacagaatcttgtcataatccatcttgtcaatcatgtccgcctttattctggctcttctgggatggtgcatgtaaataccggccgagacagagtcactgaacgctacctggggattcatttccatattctgcaaagcagctttgttgcggttcttgtaggatgcgaaggcatcgtcgtcacggcgtggagcggtgaacgtcaagtaagtgagctgcatcattgtttcgaagtctttcggtgaacagctgccattgacggtttctgtcttgtcaccgataccatagctgacggaagctttcttgccggccagaactttttccaggtctacggcactgaaattacccagaccaccgacactcactgcatccagtccgttgatgttgatgatttccgagtcggggaacagggaactaccgcctaggctgactcccttcatgcggatttcgtctgccttgaagtctgtcttcttgataatgaccttgactccgttggagagtgtcagcgttgtagtgccgaatgtatcatctgtctgctcggatacaatctttccgcctttcggggcttcggccatcaaaggttcatccgacaccttgtctacgtaggcagtcagtttttcagctttaatgtctttcagaatcttcttgattacatcttctgtcggcattttcaatccttccttatccggaccgagaattgcgactacctggttactgtctgtcacgagggcttgcatcatctggttcagtgcggcaaccggaatggcgggagctatctgattgatgatggcgtattcgttttcgatgcccggaatcggttcgttatcgaggaaatgacggacatattcatccacgtactcttcattcttgcgtttgtcacgctcgttataagcagattccagttggcgcagatattcggcacgggcacggttgtattccgtttccgtaaagccgaattggcgggcgcgttctgtttcgcgcaggagagtggctattccattttctatggcatcttccttgcagacaacgacaccggtgaaggcatctttggttttggcaacaaagaaatcatcgtcataagtggcggcatatatataaggaggattggcggtctgtaccaattcgttcagacgcgcattcagcatattgttgatgagcgtggttgcataattctgtaccagatagcccatgtcgcctttctgctcgtcaggagtggcttcgtgcttgttgaagatgagggcttgtacattggactgttccttgtcctgataaaccaatacaataggctccttgttgtcgtttaccggatagtactcgcgtttggcagcattgggctgggcgggaatatcagaaaacattttcttgatttgggcttcgatggcgtccacatctatatcgccaactaccacaataccctgaaggtctggacggtaccacttttcatagtagtctctcaaagtttgcggtttgaagttcataacgacctccatcgttccgatagggaaacaagtggcatacttcgttccttcgaacatgactggaagcatcttctcctggaagcgttgtatggcgctcatacgggtgcgccattcttcgttgatgactccgcgttccttgtctatttccttcgggtccagggtcaaatcgttactccagtcgtgcagaatcagcaggcaggagtcgatggctcccggagtagtgaccggcacattggaaatgttgtatacggtttcgtctacggaagtataggcgttcaagttttcaccgaatttcaccccgatacgctccaggtattgcttcagtgcatcaccggggaagtgggttgttccattgaaacacatgtgttccaggaagtgggcaaggccgcgctggtcggcttcttcctgaatggagcctaccttttgggcaatgtaaaagtcggcccggtttgcaggctggctgttcttgcggatataataggtcaatccgttgtccaactttccgatacggacatttttgtcgaccgggataggcggcatttgctgtgcaaatacctgctgaaaattgcagcaaagaattaacgctacaatccataaaccacgtaatagatgtttcatattattatgaatttaaattgttcttgaactatctgtcggacagcccttagataaatcacaacttctgttgtttttttcggattccattccggataaatggaatttatctgactgcttcccggatgcggaccaatttggtcagcaggtcttccagcaggtcgagtttcagcatgttggcgccgtcactcttggctacggcgggattttcgtgggtttcgatgaacagtccgtctacacctacggcaacaccggctttggctacggtctcgataagttgcggcatacctcccgtgacgccactggtctggttgggctgttgcagggagtgggttacatccaggatgacggggaaaccgaaggtctgcatttcggggatgccgcgatagtcgatgactaaatcctgataaccgaaagtagttccgcgttccgtcagcatgacgttcctattgcctgcttccactactttatcagccgcaaagcgcatggcaagcggagagaggaactgccctttcttgatgttgatggtttttccggttttggcggcggctacaagcaggtctgtctgccggcagaggaaggcgggaatttgcagaatatccacatattcggcagccatggtggcttcttcggcggcatgaatgtcggtcacggtaggtactccgaaagtgtcgtgtaccttttgcagtatcttcagcgccttttcgtcgccgatgcccataaaggaatccaggcgggagcggttggctttgcggtacgaccctttgaatacataggggatttgcagtttttcggtgatagtcacgatacgttcggcaatgcgcattgccatttcttctccttcgatgacacatggacctgccagtaggaagaagtttccggcaggattattctttaattcaatcataggttgttactgattaagtattttcaattgggtataatcaatgttattgcttcatgcagtacgctgatgtccagtggaaaatgacggtcgagaatacgtccgtccaaatcgacagaggcattttgcgcacgcagcacttttactttttgcgtacggtagggcatcactaccttatggttcagaatccgcccttggataagcatccacaatcccgaccatagttgcagcaattcgggacggtaaatgacggaaacatccagccagccattatagggcactgcactaggcgcttgtccgtatccccacgcactgcctatgcagacagtcatgatgcgtccacgtatgtgctcgccgtttatcttgagatgcatgcggtacagcttccgttcgaagataatagatagcagtgccatgaagtaagagaggaacttcactccccagaaacgcttgcactggtcggtgattttcacgatacgggctcccaggcctatgttgatggcattgagaaagtagcgtgtcagatgcttttcaccgtcgtaataatagcaggtacccacgtctattttccggcggcggttgttgatgatgcaatccaccgctttcttgtagtccgaactcatttcccaatagtcggcaaagtcatttcctataccattggggatgatgccgatggctatattctccttgtccggtgcattggaaagcatgatgccgttaatgacgtcattcagtgcgccgtcaccgcctactacaacaatggtgcggtagccgttgttggcaaggatacctgccagacgctctaccgaaccgaacccttcggactgcacatagtcgtaaggcacacctttgctgtccatgtattctttgatttctttccaccgtttctgcactttccgtgttccggctttggggttgtatattactcccaacttttcgggttctgcactcatgattctatttacaatttgactatttactatttacgatttaaatcacccggtcactttatcgtttcatcatccttccaacttcttctttacaaaagctatcttttcttccatcggccaccgggcattcatccaatggatggtaaatccacgccgttccataccgcggaaccaggtcatctggcgtttggcaaactggtggatggctgtttccagttgcgtgaacatctcttcataggtcaacttgccgatgacataaagtgtcagatacttgtattccagtccgtaatagatgaggtcatccggttggatgccttgctctatcagacgacgcacttcgtctatcattccttcttccagacgctggtgcaggcggcgggtgattttctcccgacgcagttcccggttgatgtccacaccaatgatgaggctgttcagctgggggaaggagcgttcgtctactggggtatgggcataatactcttcgatttcgatggctcgtatggcacgtttggctgtgtctacgtccgtagtattgtgcaggcttttgtaacctttcagtatgtcggtcagttcttccagcgatttgtctgccagacgggtgcgcaactcgggattctcgggtacgggcagcagacggtagcctttcagcactgattcgagatacattccggttcctccacatacaacgggcaggcaacctttttgtttaatagtctcgtaagcattcaagaaatcacgctgatactcgaaaacattgtacttatagcccgggtcggctatgtcgatgaggtgatagggaatctgtttcccgtcgacggtatagtcggcaaggtctttgccggtgcccaggtccatcccccgatagatttgccgtgaatcggcactgatgatttccgtatggagttcggcggccaaggcggctgcaaatggagtctttcctgaggtggtaggtcctaatatggcgattaaatcatagtctggcatatataagttcttgttaatctcactacaaagatagtgcaaaccgaatgcagaataaaatgaactcgttcattttttatgctgaggtgcagcttatcttcgtgttagtgcaaagataatgcaaactgggagtataatggaaagaacttgctcatttttttacgtgatgctataccttcttttctactttgaagcagaaaaagtgaaaaaggacgtgaaaacgagcattaatcttattaaaatgtgttatgaaacatgctttttttcttggaaagtttgtcaatgtcccaaaagtccgtacatttgcaatgtgtttttcatagtattagatttaaggttaacaaaggttggagtacagcggtactcctttttttatgccctaaactgaactttggcactttttttctatatttttgcactatatattgaatgaacaaacatattcacctcttatgaagctctgtatatagctacgctcaacgaatagccctgcttgataaagctattcagctatctggcaaacgatgacccgtttgccacagagattgtgtatccttttattcatgaatttgcaggatggcatgctgtacttgtacagtgtgttgttttgtgctattttattgttgagcaatgcattatacatataaacagatatggattatcaactttccggtaatgatgagcattttgatggagcagctgataaatataaccgatgctgttttcttaggtcacgttggcgaggtggaattgggagcatctgccattgcagggatttattatttggcggtctacatgcttgggtttgggtttagtatcggattgcaggtgatgattgctcgaaggaatggagaatgtggctatggtaaggctggaaagatattctttcaaggtttcttctttttatcgggattggccattttgctttgtctgctgatgcaggcaagttctcctttcatattgggaaggttgatttcctcaccggagatttatcgggctgtaattcagtatctggactggcgcagtttcggtttgctgttttcgtttccgtttttggttatccgttcttttcttgtgggaataacatgcactcgggcattatcgtgggctgctgccgttgcagtagtgattaatattcctttgaattatattctgatattcgttggaggactgggaatatcgggagctgccattgcttcttctctggcagagatgggttctttggtgatgcttcttttctatgtatggctgaaaatagataaagggaaatatggattgaaaccggtatatgacggaaagctgttggtggatgtgctgagcttgtcggtatggagcatgcttcatgcctttatcagcgtggctccgtggttcttgttctttgtggcggtggaacatttgggtaaaacggaattagccatttccaatattacgcgaagtgtatctgctgtcttttttgtaatagtcaattcttttgcggtcactacgggttcgctggtcagtaatgcgattggggctggagaaaggagggctgttttcattatctgccgtaagatactgaggttgggctattctgctggatttccactgataggggtagctgtatgttataatcgcttgataataggaatctatacagataacgaactgttaacagagcaggctttcatcccttttgttgtgacgttgctgaattatacctttgccttgccaggctatgtatatctcaacgcagttggaggaaccggtaaaacccggattacttttcttttccaagtgactaccactgtcgtgtatctggggtatctttattggttaagcgcttgcactcatgcatccttggctatttacttaacggcagaatacctttttgtgattttgctggcactgcaatcggttttctatttaagaagtaaacaatattagaaacatatcgaattatgatgactaaaatatatccgcgtacgggagataagcaaaccgtatatcttaatgctgttgtaaaggatcctcgaatagaggttggtgactatactatttataatgattttgtagctgaccctttgttgttcgagaaaaacaatgtgctgtatcattaccccatccatcaggagaggctggttattggtaaattctgttccattgcttgcggtacgaaatttctgttcaactgtgccaatcatacgttgaaatctctgtctacttatacatttcctttattttacgaagagtggggattgaagaaatcggacataacggatgcatgggatgacaaaggagatattataataggtaatgatgtttggattggttatgaagcggtgataatggctggtgttcatataggagatggggcgattattggtgcacgtgctgttgtgactaaagatgttcccccttatacaattgtagggggaactcctgccaaagaaatcaggaaacgttttgatgaggatgtggtgaagaaattattgcggctgcaatggtgggattggtcgattgatgagatacgccgttacttgccgcatcttgtacaaggctgttgggatagatttccttaataatccatcatcagtgagttgccggtcttgcctcgtgaaatgtcaaggttaggcggtgcatagctctggttacagctacataaagcatactcttgtcaatttccgaacggtaatttctctcatccgtctgtggaataatgacttcgtcaaactcaagcccttttgccatgtgggcagaggtgatgacgatgccttgcacaaatgcggagctttgacttgataggaagctgatatcattggcatatgatttcagcatgtctgccatctccttggcttgctgctccgtcttgcatatgatgccaagagatttatatccggatttccggtaagtggagattagtcccataatgccggacagttcttctacggcactgccgaactgcaggatttgtggcttttctccatgccgggcaaccggttccagctctgcgttgggatgaatcttttgcgcaaaatccgtaatctcgaaggtggaacgataactcttacacaatttcatgatttcacttgcagtaagtgacttttggatagtttctgctgtggatgagccataaggattcacggactgtcctgcatcgcccaacacggttttccggcatggaaagagtttctgtattaccttgtactgtatgggcgaatagtcctgcatctcatctatcaacagatgtttgactctgcatggctggttcccgtttccctccaatgccaagtgtaggtatgccagcggtgccaagtctgagtattcgagtgtatgtccctttcgcattttgaacattccgggattatttgtccatttaaagaaatctttgtagacttgaatgtcgttattacctgcaaacattagtctgatttctttcttcagaaggtttcttccggcggtggttaccgtaaaggcgtattgtattttcaacatatccagcatataatcagccatagcttcaaatcgtcggcgtatggggtaacggttgaaacgtaggtactgttcttcgataaacggggcaggtatggtgatgtatttggtcagcttcacatctgctgccttgaagtaggtgttctctatgtggaggataaacttgttaagctctgaaatgaaaccgaaagaggctttataggctattctgtcgatgaggcttgaggatggcttctctaacagttcattcactaacccgaagtatgtttggtacttatatttgtgttccaacactccggagagtatttgttccatactggtttcgggcacggtttcttccccaagttcggggaggacgttggagatgtaatcggaaaacactttgttgggggagacaatcagaatatcttttgacgagatgctgtctctgaaggtatagagcaggtaggctatgcggtgcagggctatggatgtttttccagagccggccactccttgaataataagcgtgcggatatctttgttgcggataatctggttctgttcccgttggatggtggcaacgatatttttcatcttgtcatctacattggaacttaactctttttgcagaatgtcgtcatggacggtcagggcactttcaatcataaattccattttgccgccccgaattctgtattggcgttttagggaaatttctcctttaatctctcccgatggagaccgatagcctgcttctcctaattcatggtcatagaacatgctcgaaacaggtgctcgccagtcatggataagggtagctcgactttccgggtcatagaaggtatggatgcctatatagataggcatcactttgctgttttctttcttttccaaaaaatcaattcgtccgaagtaaggaatggcaagtatcttggtgagccgcttacgcttgttgattacactttcccccaaggcaaaatggtttaggatgctttcgcgcatggagcgtatctcgtgcgggtcgatgtctttgttggaccagatatagtctttgtattctgccaaggtgtcgacgtggtctttcactgatgcgtcggtattaccgataacctttttcagaaaactgattatttgctttaaatattctttctcttgtttctctgtttgattgaatgccataattagttgttgctaaaaataagacagtgtgcaaaattagtgtattgtatcgggaagggaaatggctatttatagctatatattggggagttttatatctttgcacattcaaaaaagtggaggtaaatggatattcatgagcttgcaaggcagaatcagcaatctgcatggaaagtattggaagatacccgtattattgaagcatgggagcgcattggagcaaccgttcatttggtgggctcactccgtaccgggctgttggcgaaaagtagggatatagatatccatatttataccgataggttggatgtaggagagagtttttcggtcctccgggaacttgcggaacggttgcctttgcaggaaatacaatataggaaccttatccatacggaggaagagtgcatggagtggcatgctttatataaggatagagaacagaatacttggaagtttgatatgattcacatccggaaaggttccaggtatgatggtgttgtagaaaaggtgactgccgctattgcggagcgccttactcctgaaattaggaaaacgatattgcaaatcaaattcgatgtgccggatggtgtaacgattccaggtatagagatttatcatgctgtctttacgggaggtgtccgcacttataaggagcttgaagagtggcgcaaaacaaatcagttggcggacagtctcggttggcttccgtaatcttagaggtagataccaagattttctactatatggatggcttccattatattgttggcatctaacttgcttaggatgtttttccggtgattgttcacagtatagatgctcactcccagctggtaagcgatttccttgcttagaaaaccttgtcggatgagtcgtaatatttctttctcccggttggataattgtttgtcgggagaaacagtgcatgttggaagtatctctcccgtttttctgttcaccaccgtccgtttgattctttcgataggggtctggtcgggaagtatgtccattactcccatgattatccaggctttaccattccggtctgtttctatgatttgttgccggctgcttacattgatatactgttgccgtgcattcaacatacggaattgaaatatttgccggtagtcatttctttcttccggtgggagtgagtagatgaactgtccatgctcgatttggcattctgtgagttgaattctgtcatcagggtgtattctctcttccagtaaatcgccttgttgcctgattgtctttatccaagtgggattgtatccgaaaagatgggcaaaactgtcggatgcaaaatcgtatctttctttaaatacgtcaactgtaaaaatacagttctgactcatttgtgagaacgcttgcacggatattcttttcttgttccacaaatcatagtctacatcgggaccgctaatctgctgtcttgcccataattctttgggagttgtcttgttggtagtcatggaacaaagataactgataattttcttttgagctttatcttttacgggataatattatttctaagaatatgttgtagggttggattaagtggctacctttgtaggccgtgtcattggggacgtcgtgaatgaaaagcaaacgagtaataaattcaatatgtgataagatgaaagatataccggcagacagcttaataaagaattattttcctgtaaattatatagattctttttctaaagtgatggtcactgggcaggcattgacaccggaagattttcgcaatcttgccttcagccgatttcctaaatggattggttggctcatgaatttcaggaatgcgattgtaaagccattaggactggatacagcaaccagatttacagatatggtcttggataaaaatctgcatgaagaaattctcggaatgctggataagcatcttgatttccatgtgtccatgtggtgcggggaatatcacgaaggaaaacaagaacttcggattactactgttgtgaagtacaataattggctgggaagggcatatttctttattatcagaccttttcatgggataatagtaaagtctatcttaaagcatgttgctggggatagggggagtgggtgtaaataaatactcccattgaaatattatcatttcaatgggagtatttatttgagtggtgccaccaggaatcgaaccttttgcttcggtttattctaactccttgagtgactgcacattttttgctttatcttttatgaaaaccattgaattggccttacgctaaattcattgtttttctttactaatctgacaaaatttgtctctttgacactgcaaatataatacacaggttcgatttctgcaaatattttcattccttttaattatagttttcaacaagagaaaaaaataaaaacatgtgctaaatcaaatgcattaagaatttatttattgtttggggtgttgactttaaagttggaaattttgcttcgcaaatcattagaaagatataccccttgaatctttattttgcatgaataaaccaaaagcactaaaagagcaaaaatacaaatgacgactatttcactaggcgccaaaaagtttggaactgacttgggcatgaaggcacctgcaaagagatctactaaacataagattatagctcccacctttcctaaagcactctttacctttcttgatttttgtatctctatatcgcttacaatttgtgcaatcacagtattattggttttcattgcatattctttcaacgtaaatatcgaaacttcttcattattaaatagaaaaatatatttcccaattaagggtactgctagtgtacataatgcaaagaggatacaagtaaaaaatttcacagtccaaatacagacaatacctaatattacgaatggaatcaggtttattagagttaaatcctgaaacgtaattccaggttctttttggggacaacacacacctaaatacaaatctgtaaacaccaatagaataaggaaatttgtccatatatccgtatcataaatcttgtggttgtcaaataacgcaatcaaatctttcatgttgttcataaatacttttttaaattaatagtttatagtaaagcggcagtcaacattttaaatttccactgtattaaaatagagcctatactgaaaaggaacagggctattggttatcaataccctaaaaccttattcgatataatgtctacagattataccattcaaatatattatgtgttattggattttacaaatatacagatactattcagaatgtcataacttctccataaatattattttgtacagtttttttacttataattcatgcctttatcatactttgcggcattgctgcatgaaggaggtgtgcatgccaaaacagaaaagtttttgagccattcatgtaaaaaggatatacaggatgtcatctgatgacttttaatgacatctgatgacactgctttttatgtttcggatataaagcggttctttgtcgtgtattaatagtgaactaatccatgaaaatgagatgccatgaacatacaagaagcaaagaacatcaggcttgttgattttttagccggattcggatacaagccggtaatacagcgtgggaacagcgtatggtacaaatcgcccttcaggacggaaaaggaagcctctttcaaggttgacctccataaggaattgtggtatgatttcggtctggggaagggaggggatattataacgttggccaaggagatttatcggacacaagatataggttatgtactacagtgtattgaggataaaagagccgtactgaaaccggttactgtttcctgtccgtttgaaaaggcatatcccgcctttcaagatttgaaaatcattcctcttgccaaccggatactgcttacttatctgaaggaacggtgcattgatctggaaactgcccgaaaaatatgcagggaagcccattttaaacggaatgggaagaattattttgccatcgctttccctaatatttccggagggtacgaaatcaggaacaggtatttcaaggcttgtattgctcccaaggacatcagtcgcatcattagcacgccggaaagcaggatttgctatatttttgaggggtttatggattttctgtctttcagaccggcttttccatctttggaagagggggattatatagtgttgaattctgtcagtaacttacagaaggctttttctttcctttcacaatatgacggcatccgttgctgtctggataatgataccgccgggaaaaatgcggtgcaggcattaaaggacaaatacggaatccgtatatgcgatttttcgcatgaatattccggatataaggatctgaatgaatatttgtgcaggaagaacaatctgctccatatctaatagatgtattgaaaagactgcctgatgatatacccttgtttctttcctgtcatatgtggcaggaggaaacaagggtgatttttcatgtggtgatactatgttaatagtagaatgtggtcagatgcgttttatggtcttttacaatctttacttcatgcatctgtccgtatatctcacgcatggataccggacaatccatcttttcccattcttccggggaaatcctcatgtcggaatgcctgaaacacagcatgaccatttcctgagaatcctcttctgcgaatatggtaccttcatggtcgttgacaaactgtttgagtccatcctcatccttacaggatatttctccgacgtacatatcctcgctcggccgggtgtttttgcggatatggattttgaaccattcccggctttccggctgttcaggtgcgccacactcccacagggctattttcgcatcgtagtaaacctccccgttttcacatgccccgtaatgcccccaatgcttgaaacggccggtagtccatgccttgaaccttacatcgcctgcctttaccaacagacactcaccgccatgcatatcgcatttgataccctctttgtcacgggacacgaatggaacacgggaaaaatcccggagtataatgttatctccatatacggcatctataaagaacagccgggaacgctcaccataaccggaaacaaagaacaggttgtctcctgtccgtggatactggccggagcgtgtcttttcgatgtgttccaccatggtattcactttatctatatcttcctgtacaagtccatatatccgatcataccagtagttcaggcggatgaaagtttctttgctatacttgtttgttgtctgaatcataatttccttattttgtgattaaacatttccggctttggcaaagccggtatttctatctcttacatgtcagacatttgtcttttgctctgatagtgcaaggcttggcgaaaaaataccgcagcgaagcgaggatgattttttcagccaaccagtccgaaggaccgccttgcgcatcagaagcaaaaggctacctttacatgtaagaaatagaaatgctgaccgatatatgattccaaaataaaaaaacgtataatctgccggttctgtaataagaaagccatgaaaccctctctttttatcgtttccatgactttcttatgtttatgtcgtgatacttggaaacgggtattaccaatgatcaaatgtttccaccctgtttttttccaacagaacaagaatgtccttttccttatataataatttgcctcctactttgtaatagggcagcctgccgttcattctgtaatcagccagcgtccttcgtgtcagcttcaatttctccgccaactcgctgtcggtaatgtaacgctctccgttcaggaccggacgaaggtttttctcctgatcatccagcattttggacagggtgcttatgttccgaaaaaaacgtataatctcagggctttctttggtcagtatgaattgagtcataaggattcgggggttacatggtgaatactgttttccaaataacgtataatatcctgacgcctgtaatataccttgcggtctatatggctgtaagggataatcctgcttctccgaagttgcaacagctttcggggcgagacattcataagcatacacgcttcctggttatcaatccagtcatccatactacagatgcctcctccgcatgtttcacgcattctcttttcaacggcttccaaagcctcattcatttccatgaatgccttagcttcgatacatacaaattccataaactctgctttttttgtccggcacgaaaatacgggaagtaaaagtcatgggcaaaaggatgtcatcaaacggcatcagatgtcatcagatgtcagagaccgctctgtttggggaagcaaattaaaagaatggctaaaagtctgtttctttaccggaaaaacagtatttttatcccggacaatctgtccgaaaataaaaaaacaggaaatatggaactgataatcaatgcaacattattactaacggctatcgttctctggatatacggacaatactggagaaaaaagtgcggcaaggtgctatgccaatatgcagcagcctacgatgagcgggaagacagggagaaaccgctacgtcaagccatcatagcaggaaatcctcatgcaccgctgttatatgcgctgacttgtcctgagctgtttgataaagtccgtccgttgcgattgttctcattcgggagcattcgctgcgtgtttgccggctattattttcccaaacgctttgaaagctggctttgtgatgaccagttggcattcgtgcaaaaagtatatgatttcaaggatggaaaagacagctgtacggaatatttttcacaagcattcctgcttctttccactgatgaggatattactgccatgtttatgccgtgcagcacatcagaccgctattacagacgtttctcaggtattgccggttttctggaaacgcatggctatgtccgttcaggactggatttaatatgcattacggaaagcagggagtgtaaacacgcctcagaaaaacgctctgaaataaataccgccaactatatgatgtcaaacgatctgtacggaaagcgcgtggtgattgtcgatgatttgctgaccagcggatccagcctgatggaatacgcccataatctggaaagggccggtgccaaagtggaaggtgctgtatttcttgcccgtacctttcagatgccttcgccggcaaaagtaaaacgcctggtatggaaacgccatctatcagtcctgatccggagaaggtctgacgacctgtaaattgtaaagtttacattcggattttacaattttacacctcgaatttttacatttcaatttcccctatactatttttatatctgtattttattgatttgcagtgttatataattccccgtccaatataaacggataatgtggcatacatttttcactgaacatggcatatactcttgaaagtgcgcacaagaaaagggtattccagtaataacctttaaaaagacaggagaaaattgccatgatgtatatagacaatgaagtgcttgaaaaaatgataatgaccatagtggaaggttttgaccgtatagaaaagaaactggacaggatgggacgcgtgaaggactgcctgaatggagacgagcttttggacaactatgacattgccaaactgctaaacgtgtcattgcggacagtcgcccgttacagggaaaaagggctgatccgttattaccagacggacgataacgggaaaaacttctacagaagctcggaaatacaggagtttttacagaaacgtgggaaaaaagataagggcgggaataccaacatgggaaagttatgctaactttgtttcataaacagttgttatgaagacaaatgccaattcaagatataccgttgcagtccttattgacggggataacgcatcctttgagaggatggaagatataatgggctttgtttcccgttacggggatgccgttgtgagacgaatttatggagactggacgaggaaagcgctttccgcatggaaggaaagtgccagggagcatggattcaggcttgtacaagcttcctcccatgttcccggaaagaacacgacggacattgcactggtcatagatgcgatggatattcttcgggacgggcaggtggactgtttctgcctggtggccagtgacggtgattacagcctgcttgcccaacggatacgggaagccggggtgaaagtgctgggatatggggaaggaaagaccccggtgtcattggtacggtcctgttccgtattcctgtatgccgaccggaaggaaagcaaggcagaggagaacactcccgaattctttatccgaagggatatggagtatttcgacaaggcttttgagcaggcggctgacggcaaagaagaggtttccctttcactgatcggcggtgcattgaaaaaaatgatgcccaaattcaaggtcaggagatatggatgcaagacattgggcaaactctatgaaaagttggaccggtatgagctggtcatgacggaaaagggagtggcaaatgccgtacggctgaaatattaaaccgcatagcaggagtgttccaaaacgtcagtttctcctatacatcgttttatgtatcaggagaaactgacgtttgtgttctataccgggatggggtttacccgtaatgtgtcaagattgagataggctccccggtagaacgttcttccttccctgagcatgcgccacaggacgtcgcatccgatttgtgccaacatggaattgatgaagagatcctgtttttgcaatgcctcagtcagcgagcagctcggtcctgaatccttctccctgatggtggaataagggacttcctccgttatgacgttcatcttgggtataggcaggtattcagtggaggagggctgcggtatcttgcttttgacattacctatcagtacttgtccggtggtctgggcattgccgaaatccatccagtatatcggtgatttctcgtcatcgtatgaacgttccctatgctttttcaaaaaacgccacagaccggtccgtgaacgggtggtgtccgtgcaggtgatgatgatattcgccaaaacggaatctgatgttcctgacggatagcattgcccttttgcttcccatgaaaagccgaaaaagcggttgatacgggttacaagtgccaccgccttgttcagtccgagctcggattcgctgaacaactggcgtccgatgttcgcttccgtgacagtatcggggtcaaaaaccgtcaagtgcaggcccggatgtccgagtgcctgcaatgcgatactcattcttgccagattggtggccacctgcgatccggttccgcccgcaccgattacgaaaacggttacgggatggtggggattgagcaggtatctgtctgtataatgaatctttttcatatcaataagtctttaagttgtctgtccataggtttcaattcgttatagtcaaacggattggtccgtgccttttccgtcaccgaaaccagattgctttcggtgggattcctgcttcctcccaaatgggaaaattcactgagccagaagcgtttttcccaatgctcaaggagttttgagaaagtcatgttttccggaggagtcaacgaggcatttcccaggcagacactgcttcccgttacattgaaaaacggggcaaggaaaagcgggctgtcttctgccggtgcttctcccttataggcaaaaatttccagtctgtcaccggaagccctgtaaatgacaccgggtacatggaatgtcccgtccggaatattcagcctttcggaaaagaacatctgccgttttcccggaggattgtaccagatgtacctctcgtgtcccttgcgtgtatcgcaccacagcatattggtggggattttcccatgcggtacatcctgccggttatccgtatagtattccacaagggagtccataaattcatacgtaacggggacggcagcctccatccggcctctgtcgttgatcggatgcagttcgagataatatgtcccgtgtccatagcggccatcactgtattcgtaagcaatcagtgccgctttgggaaccatcacctgttgaagtttcttagtcagttcattcatgtcattcgttttaaaagttgtcatcaatatagcctgtaaaacacaccaaccatctggaaagcctttccggatagtcatccatctgaaaaagactgtccgtttccggtgtcagtagcttgtaagtgaccggagtaagggcataggtttcctgataatccgaattcatataccccttgacacactccgccaatgtatcatcagcagaatagaccagtatgacctggctttccattcccaccgggggaaaatcgcattcctcttcataagcccaatcgtactggtagcctgtcaataccgggctttccggagtaatcaatgccatgccgtcctcaatcagttccaacagcttcagctctttttccttttttgtccggtaattccgcacagcctcctccaaagacttgcagaacggtttgcccgacatccgtctgagtgctttcatccgttttccagactgataggaatctgccagccgtttgttcgccctgatttccttcggggaagcatcggaatcccggtttccccagtcttccagttcttctatggcaaagtcataacaaaatgtctcagtaatatcgtacagtctgtggtgtcggacaaatagccggatgaactccctgacaatgttcttcaatgatgccgaaagccgttcggtaaaatcaaccggaatccaaaacaaagtaggttccggccagtcatgatggcggaacagacagaaatgcagccttccgtccttcttttccagattgatacactccggtacacactcttccataactctgtacaactcggtaatattcaggcgggggcaaccccctttcctgtatcggaaagggagttttatacccataagttccgcatatcttgatgccgaccggtagagatagtcaaaattttccggagtcgtgagattgaccggagaatcattatccatatcctgatgccaataatccggtgcaaggggtgtgattctaccggtcagaaaagcattgtgcttcccggtggcagaagtatccttcttttccgttccgaggttccccttcggatgtgggacgaacttactgagagaataatcagccgtgccagtccatccttggcttgttctgaaagctgtctgcatgtttccttatccttttttttcttgttcataccgcttaccctttcactccgatggttgtcttgaagcggtaaaccgccttgtcgtcctcccactcaggaccatgtaccgttgccgtagtcagttcagggtaggtcatggaatagaagtccatcacctcgtttacggacagttcgctgttcggatcatccaacacgagctccacggagtccttcttgaatttgaatactctctgcaatcctttgatttcaagtgccatattatttttcttttatagggtttaacaatataccatatccatttgtgccatatccgtcatgcggcattccttcggaaagtccggatattccgcataagggtcctccctgagtagctcccggtcatcctcgtaatccttgtcgaagttatacattgcagcctcctgcaccgttgcatactgtgacggagccggttgttgcatccagcgattgtccgccaattgcggttgcggcacctgtaccggttgatggaactggatttcttgcggttgtggagcagcctgctgaggaaccggttgcggtgcaggttgcctatattgtacgggctgtacttgcggctgtgcaacgggttgcggagccggggcaggctgttcgggcatggacatcggaacttgctcttcgctccggtattgtggcgtctgggctgccatcggttgtggagccgattgctgcaaggatggctgtggatcagttaccggcggctgtaccatgtcgaacagacttccctcggatgccttcttctgcacttccgccatttttttgtcaatgtccgcctgtttgtccggctgtgccagtaccttagcctgcctgagccaggtcaatgcttcggaataatgctttcctgccgtggcatcctcagctttcttcagcagtttttccatcttttcccgtttttcacgggcttccttggactccttttccaccgtaggcttggaggttttgctttgtgaaaccgcctgctctgcctgcttctcgaacgattccaggttggtaaggataccttgcgctttctgtacgggtgcaccgacagcctgcaggaatcctgcatccagttcttccggcgtaccgttcaggatgagcgggacaatgcgttcgccggcctttactcccgaccgtctgggaacgacggcaaccgtcagattgtcgtttacccgtctgatgttgatactcaggtctgtgcctgccgtaatcatttggttgattgcttgaaaaaacataatggtaaaatttaaaatgttatacataagtttccttgaaaaaatccttcaggattctctgcctgtccggattcgaggcgatgcctttcaacggttccagatagtagccgatacgtctgggcccgtctgtcgtacagggaggctgtcttttgacaggtgttgtccggtttgtggcaggccatgcagccggcatgaccggagccgaggatgtaaatgtgtaagttctcatatcttctgcatttgatggttatacaagcatgcccatgacaatcaggacaaggattgttttcaagacaaaggtgaatgtcctgaaggcgagacggaccagtgttccggacataaggaacaggacagacaggtacacgggaatgacgcccttgcagtaaagcaggcatattcccgtaagcagaaccagtgcgaccacttgcctgcagatgttttcgatgagtttcagtttcatgtctttaaatttttaagaatgaataatcccatcgggatatgttttcccgattttataggcctccggcccttggattgcctttttgcgcaaggcttggcaaaagaaaataccgcagcgaagcgaggatgattttcttttagccgaccagcccctgaaaggggccgccttgcggcaaaaacgaggcaatccaagacctttgccgcttaaaagcggaaaaacgtatcttgtacatatataaaaaagaggcacagaccccagtctgcacctcttctgttccgtaccttccgcccagccgtctatatggaaccatgcggctgtccatcttccgaaagtttccggaaaatctcaccggtaacctcatttaccgtttccaatacgccatccagaaattctttctgtgtgagttctccctgttcaatccgtgccagctccgcttcccagccggaggtgagggaggcgtcagccactttcattccgcgtaccgtttcatataaaagaagaccttttggggtcgggataatgtatttgcccgaataccggatatatttacgctccagaagcgtacggatgatattcgtgcgcgtggatgcggttcccagaccggtcttgtccatatagtccgccagttcctcatccgtataaggggcagcgggcagcgatttcctgtgtataaggctgcatcccgttaccggcagcttctcctcccgaaaaagttcagggggtacgggacagaggtcgttgtcttccgcgacaagccgttccctctgaaagataccgagccaccccgcttccagaatacggtatgtacggattcggaacttgcgtgcggcacagaccgcttcaaccgtcgtatattccaccttgcagggcggcatgaacgtttcaagcatcctgccgacaacaagggtgtaaaccagcctttcctccctgtccagttcccccggctgtatgccggtgatgacaatggcatgatgctccgccgtgtcctgatttccggttacgcctttccttgcagcaaggtcgatcataccggcatattgacggaattccttgccggacagcagcttttccataaccggaggcaacatgtcatacacgtctccgggcagcagacggctggaagtgcgcgggcaggagatcagttttttctcatacaggctttgggtaatttcctgcacccgtatggctgtcaggttatggtaacggttcgcatccttctgaagcccggtcaggttataaagggcaggtgcggtgatttcctcagtccggctgttgaccgccgtgatacgggcatatcctgccgccttgcagtcctcgtaaagttccagggcatcccggcggttgcagaaatcttccacatgccgcatctttattatcttcccgttcttgcagaggctgacgaatacgggccagctgtctgcgggaatgtgattttccctttccctgtaccgtccgcttatcgctgccaatacaggggtctgtacccttccaagcgagttgttcccgaaaccgaccgccttgcagacggcatagctcgaattgactccaagaagccagtcggccttgttgcggctgtctgccgccaaaaacaagttgtcgaacaggctgcagggacgaaggttttccattcctttggcaatggcttcgtccgtcaaggaggagatccacaggcggaggcaaggtttcctgcatcccaaaaaacgataaagataccggaacagcatttccccctcgcgggaagcgtcggttgccgcaacaatggtgtcacacgcatcgaacaccccggctatcaccttcaactggagcaccgcattgatgtcgggattccatcccgtgtccgtctttacatgccgtaccgtcagaaaaggaggcggcagcagggggaagttctcccgctccacccatgccgtaccggtatctttcggcatcgccagggaaagcatgttgccgtatgtccatgttaccatgtatccgtttccgctcatatatccgttctcttttctgtcagctcccaaaacccttgctatctctctgcccacattgggcttgtcagtcactatcgctatcatattctttttccttttgatgttccgtaccgtcaggaacggcacggaacgtgagttatacttattgtttcccggtcaaactgccgcctcctccttctgacggagaccgtttatttccataaccggtctgccgttgccgtcgggtaccagcttcagcgtggcatccattgtcaggctgaggaccgaaatatggagtttcagcggaacgatgcccgtttcctttccttgcagcaacagttccatgttgccttccgcttccagttgtttcttactgatacctgcggccttcagaccgtcccagtcgatatcttccgtcttataaatatgacgggtattctgatccgtattcatacgattcgtttttttaggtttgtatgattgattctgtttctctccgggcaggtctatactgcctgcgatgcacccttcttctgctcctgctgttgtccctgtgcggtctccgtctgtgcggcacggcgggaagtgtccctgcggatgtccggattttcctgaaaatactgcaactgcccggaatagggattgactttcaggtaggaactgaaggtctgcccgttgtttttcagcccttcgacaagcaaagtcttgccatcctggaggttcgctttttcctgtgccgtgaacacgtgcccgtaaacctccgccggaatacgcggtgcctgctgctcgttgaatccgttcggcgtgcgtgaatacatcgtcctgccggtattcatatccagcttgacgaacgaggagaattcctccccgttgcgcccgatcatgttttccagatagaccggctgtcccttgcgcagggtttccctgtcttcggcagtcagctgcacgttgcagatttcctttggaatataaatctctccggtttccggattgtgccgcgtgtagttcgggcgccccgtaaccttgtctatcgttacaaaggacgagaaggtgtcattcctgttcctgaacttcatgtcttccaccagaatggtatgtccttcgctgagcatttttatctgggtgggcgagagaggcacgcctccgatggaacgttcgttgaaaatctggtttttcggaaagatgaattccagtcccctgcgctcggcactgtactggagtgtggcatcgaattccttgcctgctttggaagtcataccctccactttgacaggctgtccctccttcagcagcctgatctcctctgcggtaagtttgaccccgctcacttcctgcgggatgtaaacgtgctcctgacggacggcaaccagctcgttggtgctcttgtcgatggaaatcagacagggggtatattcactgccgcgcaggttgagttctgccacacgccccatgttgccggtctcacgcaggtttttcttgtcctcctcgttaaagttaaacccgaaataaggacgctccaactgcggttccttgcgtatgccgtgaatggccagtcccacctgtccgtcctgttgcgggatgagtgagagccttgcatccagtttggctgtcagcaaaccggaaagatggatggtcaggggcaccagtttgttggtcttgtagcccttcagcatggaatcaaggagtccctgctgttccagcgaagcctttgagattccgaccttttccaactcctcccagttgaccatgttctcattataccggtaacgcggtccttgcgactcctgcgctgcctgttgagcctggggctgctgctgttgctgtgccgcctgctgtacttcgctctgttgcaggggttcctgcggttgtgtctctttgtctgccatagctgttttttctttttggtttacactttgttccttcttgttttctctcggacggatttcgtagcgtttgaggaactctttcaccgcatccgtctgctttccctccgacaaatccctgatggcctgcttgttcaccttgtagtcgtggtaggtcatgcggagcaggcggaaatgggtaggttccttgagctggctccaaaaattcttgatgaagttttcgagaatactcgaattcttgtcgaatttcaggaatgagttttcattcttctcgtccgccggaaccgtcttcgcttttccgtccttgtcaatttcactgacagcctgtacaccgaatttcggatcgttcttgttatgaacaagcatcaattccgtaatctgttccaccggaagagcatcacttccggccttcggtttccgggtccgtttgggcttttcgttcgggatcttttcttgtgccataccttttcttttaggggttaatgaattgctttgacgcttcaaaggtatggggtatttccaaataatatgctgattttcaaaaaggtgtcatcagatgtcatcaaatgtcgtcagatgtcataaacatgactgttcccaacggctaaaccgtgaacggagaagaagggaagtgaataaacggaaagagagaagatacgtgaggcagaagggaaaaagcctgcgcatccgacaccagaaaagagcaggcgggcaggcaagacaaaaccatgcagaacagagggagctgaagccccctgtcttctcatgccttccgcttttttacagcaagactttcataagacctgtattccggctggatatgtggaatttcatggattatgaaatacggcctcttcaagcagcccatatcctttatccatgcgtcacatcggtcgcagtttgcccctgtaatcgtttttcaaatcgaatctggattgccgccgcattctttttcgtgaaaattttccacggcgaagccgcaaggaaaatttccacgaaaagattcggcaaatgcggccggcaagacaaattcgattttcctttgatgagggggaaaactgtatcgcaaacaaacctatctggaaattccgtgcaggctcattttcttgtaaagggtcgggcggctgattcccaacaaggccgctgcctgtgtcaggttccctttagagatggaaagagccgtcttgatctgttctatgtttcttctttcatctttctgcaaacacttgtctatcttctctttccccatggggtcagaaacgggctctcccgcatattggagccgtaaggaattgggggtaatcagttttcctttgcatatcaataccgccgcatgaatgacctgcttcagttcccgtacatttcccggccaactgtatcccagcagcatcttctttgccggttcgtcaaaatccaagacctctttccggagcaatccgcaagattgctcccggaaaaaatccgccaaaggcagtatatcctccaggcaattatgcaatgcaggtacggtgatggtaaaatcctgaaagcgataaagcaggtccttccggaaacgcttttccgcaacagcctcctgcaaatcctcattggtggccgcaatgatgcgcacatccatcagcctgtcccgttgtccgcctaccggacgataccgccgttcctccatggcacgcaacagcatccgctgcgtttctatcgaaaggttctccacctcatccatgaacagggtgcctccctgcgcttcctgaaaatatcctgccttttcctctgtggctccggtaaacgcccccttgacatggccgaaaaaggcggaaggtgccagctctttggacaaactgccgcaatcgaccgttacatacggcttgccggatctgaggctctgcctgtgaatcttttttgccaggtgttcctttcccgttccggtgcttcccaatatcagtaccgtcatatccgtcggcgctaccatgtgaatgtaccggttcaactcgcaaaaaggggtgcttttgcgttcatagattaccttggtgaaagcctcgttcaccgtccttatttttttgattacgggcagcagcctggtttcaaccagcggtttgaggatataatcttccgcacccagcttcatggtatgaaccgcagaatgtatctcttcataattagtcatcatgatgaacgggtgcatatagccgttctccctcatccactgcaacagcgtggtactttccccgtcaggcaatcttaaatccgccaatacgatgtcatcctcacggacggatgtcccaatgaccttcttagcctgtgccagcctgtaagtccttacagtatccaaatccgccttctgcaaaaaattgcagatataattacagaacaagacattgtcctcaacaacaattactctcataagctttcttagcctgttgtgccaaacatattatttcttttcctttttccaatacctgctgtacagtccgcccgaactcgtccacagaaaactctcccgaatcctgaagcagtgcgaacaactcatgcagcggcttgccggcatgaatgatctcccatgagcctgtcagatgatgtatccattctttcagtgcctcatgatcattcttttctgcacattcagccatagcctccatatccttcctggtctcccgaatcagggtatccagcatcttccgcctgttcccatatttcagcagggcatcgaggtctatctgttcagactgcctttcacttcccagacattccgtacatacctgcaaaagttcttcggcggaaaacggctttttcaaacagcccgaaaaccctgccgcatacaaatcccccgtatcgcagtttcccgatgcggtactcgcgataaccggaatgctccgtgaatttcccacattggccatgcgcaggagcttcaacacctcgaatccgtttgtccggggcattttcaaatccgtaatcaaaaggtcataactacggctgcggacatgctccatcagatcacgcgtgttctcacataccgtgcaagccaccccgtgatacgcaaacatttccctgattgccgccagcaaaacggtgtcattgtccaataccagtaccgtataggaccgtacggaaatccggctcctgccgctctccgccatcgcttcctctgccacagccaaaggaagacagacagtgaaccggctgcccacccctttccggcttgccacttcaatcctgccgtccaacaatccgaccagaccttttactattgaaagtcccagtccgaccccttcttccgcaatcgcattgggaagcctctcgaatgcagtgaaaatgcgtgtctgctcctcatcgtccattccggtgccggtatcttccacgataagcgtcaatacgccctggtcaaattgtgtgcgaaccgttacacttccccgctccgtaaacttgattgcattggacaacaagttgcttcctatctgtattatcctgtccctatctcctataacaaccgcatctccggcactcagcacgttcagcaaaaggttttttcctgccgccagcggcataaaatccgtttccaaaatctcggtgacggaacataacctgaacgggacaggaacggccttttccccgccactctccaaccggaaaaatcccaacagggaattcagcatggaagacatgtgtcccgccacctgccgtatgttccggctgtattccctgcacttcgacacttctctttccgtggaaagcaattccgcatagctgctgatagaagcaagcggcgcacgcaagtcatgggttacggccagcatgattttctttcttgcctcaatcagttcctcgttttcaagaacggtctgctccaactgacggactgtgccttccagcctttttttataacggtttatacgcatcatatcccggtgtatcaccatataggaccatatcagcagcaaaaccatgaatgccgtcagaccgatgaccgtggcaaatgaccgtttcccggcttccgcaacttcttcttcctgtctcttcaagtccgcttgtaccgttccatccatattctcaatcatctgccgcaactgcacattcagccttctgttcatcccatccaagctgtccgtccgttctgccagcttccgggcatacgcctgctgtctgccaaccacgctccgattaagctcatgaagcatggaggcggcagaaggagaatccgccctgtggcgttttgcgaacaacctcttcaggaatcccccttttggggcattttcccgttcactctgtctggcaatggccggaatcttcgctgcaatttcccggtcggcttcctcctgcctgtgtacccaatatatgatttcccgcatataccgctccttggctctccacaaattacggatgctgtctgtatgtgagccggaagaggagtacctcaagctacacaacaggctgtcaatgtgccgtctccgtttctgaaatgataaaaaatcctgctcactccactccataaaggtttcacagaagaaagaaagcctgagcattttcacgtatatatcatttatctcatgctttttccggttaatcatccgtacttccatttccctagccttagtctctttccattcgcagatgccaacgtaagcaataccacttatgactacaatcttggccatatatcctaccgctattttggcaagaagcggttgcaggcgcaaagatttcaacaatttattcctactttccaattattcactttttaattcattatattctattaaaattctttgcaaaataaaccgaccagtcggtttattttgcaaagataagccttttccaagaataatgaaaaaaaacaggttccagcaagtaaagttttatcatttatcagtctaaaagacaacggaatgaactgaaagggaggaaaaggaaaggaatgcgggcttaaatttctgagaacatccccaagaaagtcttaccaatagaagtgttcaatgcctgtctgctgaacgccttggcatccttcaaacttattttatgaccataagccacattggaaagaaagtcctgttcccggacaagaagttgctgatacatttgtggaaattcgtccatatattcatgggcggaggaaacaaactgcatataacatatcaggagattgccattcagatgttcgggaaaactgtttatcacccgttctatcggatttctgtattgccttaaaaactcattccaatccttgtcagccaaagaatacatttcacaagaaatctgcgagtcggggaaaaaacgcattctgacaaccgcatcaatcagtttctttttggaaggaaagtagtgtatgacagcccctttggatttatgcacggcaacagccacatcacagaatgaggtctgcttcattccttttgtgatgaataacctgtatgcctcctctataatccgctgtttcaaattcgggtccatcctactgcctatattataaaaaaatagcacagacgcaatcaacatccaaacatggtagtggaatacctagagacgaagtgacgcacctgtgctatatattttaatatagcgcaagctgtcatattccatcttgtctctttgaaattttccacttttcgtttggaagatgatatatgatactatactatgtcgttttaacagcgcaaaaatacgttatttatcgtttatttccaaatttatacgacacttaatagcactgttccataagaaaagcgtccgctttcagggacaagcagcagtattttttcaccggatttgagtttacgggtagaacagaactcatccaaggcagccagtattgctgacgatccgatatttcccacccaggtaagattggtaaaccactctcgtttgtacaattcaaaactctcgtttttcatcgcttcaatgagattaccataaataaccattgacgaagagtgaggtattacataatccacatcgtcaggagtcatgccatgtttattcagacatgatttaatatgtctaatccataacggcatcaacttcgtccctaaaagtttaatgtcctgtttaataaccataagggactcatcgaccaattcctgactttcaaaagatttccagcttttcagttcaccgtcctccctccggacagctccggcaaacatacaggtaggggtttcattggcatatgaatccatttctatccattcaatctttaaagatacgcccttttctcccggatgattttccaataatgcacaactcgcaccatcgcttaacataaagcgcaggaagtccttttccaaagccatatatggattggtgcccaaattgcagcatctttcatattcgatatcgaagtttttggataaaagcattgctgacaccaattcagatgtgctgcatattgcattctgtttttctgatgcagctatgctcaaataagctattttcagcgcttgcagacaagacagacaaactccagcagaagagaatatttcaacaggttcttcccaaagcccatgtaccatagacgcatgagaaggcagaatctgatcaggggtcgcagtagcacaagcaagcaactcaatgtccttttggctcttattggtcaatgccagcaacttacgtatagccagcatcgccatttctgcatttgtatgtgtgatttcttgatttttgtttaaggcatagtatcgccgtttaattccattttgctttaaaactatccgttgcactttggaatgttttccagaaatgagtcccaagaactcttccatttcatcattggaaacaggagagttcggaaagaagcttgcaagcccagtaataaaaacatctttcttcattagttcaatttttaattagttcatattgattataaagaactactttcagttcttctattcgcaatccattcaccaatgcatcctgaaaacattttccaaacagcaggattcgaaatgtcaaagccaatgtagaaggattaacatcggatcttatttcttttgtttcaacagccttcacaaatattctttcccataatttaatctccttatttgttatttcgttgaaagcctcgttaaatcccggatagaaatattctgcctgcaaaatcaagttaagatatgcacgtgtaatattggtcttctctttttctatgagatagatcctcattgcattcatcgtttcctccaccttctttatgtaataatcaataaattcaagcagagaggtgtgagaaatgtccttgaacttatttttggcatcttgtttgtgaaaaatgtaaaaatcaatcacatcaataaacagttcttgcttgcttggataatgatatgacatacatcctcttgataaattcagacttttttctatctccttcaggggaaccgtgttgtaatcttttgtcagaaactgtttgtatgcagcttccctgattaatctttttgtttctgagccttttactcctttcataaccttgttttttagtatcatacaaaagtaggtcttttgagtgaaaacacgttcatttttagtataattaaatatgtcctacccaattaccattaaatcatttatgaccatacataccagtttatgaaataaatgccaacgatgcctttttcttttttttcttatacatatattattttttgcttatatttgtcttcaaataagccgattagtcggtttgttcggcatagaggaacccaaacagaaagtggaatttcaaaacagagatgttcctctatgtctttgttattccatcttctggcaaccggattctatccctgttccaccatatccctaaaaaataccgaccggatggtattttttacggcaaaagtataaatatataccataaaaacaaagggaaaggccaattatgcattctatcggcaaagaaatgcctatgaaatatacataatccgcttttccctatgagaaacattatgttaccggcttatcttgaaggcatcttcatcttaacctgcaccccctgtgagtttaaaacacgaaccggtgtcttttctccggctttcaaatagaacagaatataatccttcgcacgctgggactcgaagaaacctttttcgcgatattcggcaatccacctctgaatcatcggaatctgccaacggttcatcaaaatatagtagccgaaataatactccaaatcgctcaggaaaatattgagtttcaagtaatcccaccagaactgttctttctttttgcttttggcattgagtatgataacctgatgttcataagtgtcacgaggattttcccaatcctgttgcgaaacaaatacatcgggaaccacattatcggcatgatcctttgccggaataaagggaaataaggattctattgaatcctttatctttccatataaggacggttcgtactccttgttgtacagcataacatcccgcaaacgggtggaagtgagatgggttaccacggaacgtcctaccacacaatgatccggaacagtcattaccgatgccagacgtttcataaatctgacttctgcttttgcctgttcttccttatccggtctcttgaaaggataatctgaccaggcaatcttccgcatcccccaatgcaggtctgtaagttgcaaccccgcataagcacagaaaatggaagcacgaattatcttgaagataggggtacggtcaccctcgtgggccacgtaaggcaggtcttccacgccaaaaagcatttcattttccgctatcaaatcggcagagaccgtcttgccttcttccaagcgtcccttaatcttgaagttacgcttttggtatccccaagtgtgaacaggtcgcgtagctatcagtgccacacaataattgccgttttgcggcatgaaatctacattttgcggtgttgcattgagcatcaactcgttcagcaacttaatcttttggatatagtccataaatcaacaggttttaagtgaaacattttgttaacagtgcaaatgtaggcatcaagtttcgtaccggagttccgtttttcgccgaaaatcactgcagggtcaaccaattattcaatatttattctgttctcgattctcagtatatagtttgtttccgagaaaaagcgttccatacgtactgcctgaccggttctgaacaaaggtttttcactattggctatgtaggctttttttatgggaaaattccgtgcctcttcctgttgttcaaaataaccaatggtagaacgcaactgctgttcgccgtcttttatccattgattacccttgccttttctttgtttcaactctacaaatataatcgtatctctataaaacaggcagccgtcgcagcggttgtccatactcccgtccgccctgcgcagttcaatgcaatggtcaaccggtacgaaattcacctttacctgaggataattgtccactgccgcaatccaatcctgcccctgtctttctgcaatatatgctttttcagcggcaggagccggccggtcgcatataccgaatttgcgtctgtttgatgatgatatatgttgtgtcgggaagaagtcaatcataattcctgttgtatttccaataaatcggcaaaatcttcgtttgttctctccagcatcctgttgaggaagttctcatcggaaggaagcccatgatatgtgtccagtactgttactgtcccttcgacctcgttgaactcgtaaatagcgatttcgtcagggtgtatggcagcttctatgggataaatagcatttatcctttcttgtacctcacaggaaagattacctacagccaacagcataccggctttgacagcgacggtcaggctattaataaggtatgggctatgtgttgtaactaccaaacggtttgtttccaaagcattgttaaaagccagcaactgtttcattatcatccattgcgattccggataaaggttttgttccggttcttctacaatgttgacaaatgccgatttgttgaatctggcagaaacggctgaaagggcaatcctccgttgctcgtccgtaaggttcggtatgttccatatattcgcaacttccgcttcgaagcgtttcgcttcatcgctgctcatcttctgggcactattcgcctgactttttacagattcggacaaatgtaaagaaaccaaataaagcggtacgatggattggaatccgctggacgcttccatcaacttcaccttatagtcctcacctttgacataaacaatgtcattttgtttgttatattccagttgcgcatgattgataggcagttccagactactcttaatgcgttgtttggctttgtcatattccgtaagaaaacctagcaaggcatccggcaaatccttaatcagattcggtttgttgaccatgctgatgaaattccgttcggcaggaacgtacatgatttgaggaagggcatagctgtccaatgcattctcattcttttctatgacaagttcgccttgcttcgtgtaggtaaacttgtaggaatccccttcgtagaaaatctcagtctgttcctttatgaaataattggaaatacgatggtaaccgcaatacttgttcttgaacttggcggcggtaaattctttctccttgaaatcaccccgtgtcaagaccttctccatccatgtaaaggtggaaaccagtttggcaaccgtacttttaccgctaccctggttacccgtaaaaacggttactttctttatatctatccatccgtccgttacagatgctgtttctttcaacggaccgaagtttttaatcttgattctactcatatatttattgtatagacctgttacaaagatagtgtttctaaatgaaacgacctaatgaatgttgtgtttcatttgcagtgaacatagaggtcttcccaattctttgtttttccaatttttaacctgtatgttttatgatggttttctaatagtcagaagtgtcattctgatatccgaatgtgtatcagtcggcattgaacggacggatttcggaaagattttcattgccgctgtcaataaagcggtcgagcaccttaatcatgacaacaggtatattctgcttccatagtatctgtgcgtccagctctgtacaaaccaatgccatctgtttcaattctttttccaagtatgctcccgaactgatatattcattcagaagaggtttgttttcggataatttgattacagaggcatataacttgtattgttcattgatacatttcaaatgaaacttgtcctttagtgtggaaggcggatcaagtaatttcagtttgggcaggtctgacttgttgagaataatcacagtatttgtaaattcgactgtatgatctccaggcagactatacaacaatctgttgtcaggggatttgaacttatactcgttttcctttcgtaaattctgaggataagcattgtaccagttgaagtggaatccgatgattatctgtttgtcggtcaatcttaaagtctggaaggccttgtcaagattctccggaaaaaccctatattcacttttaggctgatactggaagcttcggagccagcagtttttgaaagagtatagtgtagcagcactgaaagactccttaaaattgacatatcctattgttttatccgtacagaatgcctctgccggcatcagctgacgtattcttccgacacaattgaacttgttacagcttttgtactcatcatcagttatgacagaaacttctgtaatccacttcatttctctgccaatactatctgatgctatttggtaaaaatcctgaatttcatcttcagacagctgttgagtaactttttgatgttgtattgttgaagtaagcgaattggaaagggactccagtgcattcttcagcttatgtttagccctgtatatgcacgactgatccaatggcagtattgttgtgatgtcttccagtggaatggaattctgctcaatctgtttcaggataatcggaacattttccagccattcgttcttttcggataaggattcaggaagagccggcagtgaataaaaatcctcgtaaacataggtgcggttaagtgttgccagacgtaacattaggatatacaagtatttctgtatccagccattgatgatgctattgttgcgtacgccagcctgaagaccaaaaaatggatatttttgctcgtatttgtacattgaatcgggactgaatgagagcaagtccatatacagtggaataatttcagccagtgaacttggaatcagtacataatgagggggttggctattagtgtaatacaatatttgatttaaaagttcatattcttttctatataacaaaagtccacctaatgcgatatgaaactccttaaattctttccgttctttctgcctaagctctaccatttggctgtttgcaacagtttgtccagatgaagtgtagggaacgtttatacgttcatcaagttggaaagatgtaagatgaagaaacaagtgtgaatgggctgcaccccaatatttaagaatccattcgctgcgcttgtaaaacaattgctggttcaaacaagtccaaatcgtacggtaggtattctgatgcattatggtgaactgaaaatcatccagcattgcattgactatatcatttccgttcttgatggaaaccgcttccttttgttgcatgcacagctgctcattaatggagacaatgccttcgtataactccggcggatattccattaacgtccattgtttacctgcacgtaaagatatgatccagtcatacaattcctgatagcaatcgcgcaatacatccacattgttctgtttgagcatggcaataaaaagttcgaaccacgcttttctggtatcttgtgggatattgtttctttttatcaaatgcttttgcagcttttcaggtacattatagatatagataagcctgaaaatcataaatatactgaatgttagcagtacacagaatattgtcgcgagaataatggcagaataatctatgtactttgtaagaactccgaaatcaaaatagttaggtggagcgaccaattgatagaacagtaaaaatatggtaatagcgagcaagccaagaaaatgctttgtgcttctttcgttcataaagagttgtatcaggcgggtagattcatacttatcgtctatccgctgaataactccaattaacaagggaacggcaatgcccagtatggctgccgttataggtataataatttctttagaaaaaatgtccataatataaaaaatgttcaatagttgctatggtactggaggaaactttatgcgtccttctttatcgatggtacaagataaggcttccccttgaatttttttagctatacggttataatttgttgctgttcgtgtttttaaatctaccatttctttccaatcaaaggtatgctctatattaaaaacattctgttcatttgctgaagtaaatcgcatggatgattttacatggatattaccctcttgagaccggacattccagttaaatctgggatgatattgtaattttgcagcgaggcataatctttcgactgttgcctgaattatacctatagtcgtgtttaaatctttcagactttgggagtaataccatttgaattcatcatagatttggtaatccaagggattctcaaaaggttggaacaactggtaaattttgctcaaaaatgatgaatcatagtcatgtaaaaatgccggaacctcctgatccattaaaacacggcagcctttggccccagcctgttccaatttgacagccttacttacagcatttcctagcaacatttgtcccaaattagtgttgttatcttcaatgatatctccgtatgcaataccaccacgacatagaataccattttgcaaacaatcccacataatagtatgacatgaaagtatgacatctttcatgttttcagaccagacgaaagcgcaatcggacaactgggtgaaatttactgtagggtatttactctggcagtttgccaagattttccgaaaaatgatcaaaatattggctgcaaattcctgattccctgaagtctgaaaatgtttagagacctgccaaatattaaaatcgtcttctgtaagctggattttaccttgtgttaaagctgaaaatcctagtatatccacatagaagacaaaaccttttagattattcatgttcataatgttatcgtttataactggttgaattttttttggacattttgagctatactgatgaaacagttgggaattgtaacatattagttgttgcttgtcacaaagatagtatatctaagtgagatgagttaatgggggctttgttttatttttgattttgccaataaatggtatttcctaaaataattttgtatagttcttcatttttattgtaaaacaagttatattcttctttatgtttccatcttgaggctgttttgatgactttaatgagtttattattatcataaaagtattctatagttgaactatcaccataaatattaactccaacatatattgaattctcattatttactatttcaaattttgatatagatattaaattaattacgggtgtattttcattttctgttgggtaatatttgaaataggttttgttatatccatgtttagaatattcatataaactgatatataaaccttttcgtatatctgcatctatatgttgctctgaaataatcattttgttattttcatcgaagccaaatctgaacaagtcctgataattccatttttcaatggtcatgttttttaaaagtctaccttttttttctttattaagtaaatgataataaggtagtagattataatattccttggtcgaatattcccatctatgtacattttttaaatattcttttataagaagaatattattctttttttgtaaacttgttatttttaattttaaatctgttaacataattgtcgatatttaatataaattacttatgaattaatgggttgaattgttccatcttccactttctatttctgttccaattttttgtaattgttttctgacataattgtcttttaaattatcgcttaatttattgtctatcgcatatttctcagcactctctaataattcacatattcgtttatcactttcaagcgaatgtatgtaccctgcatggtaagtaccagtagttctggcagcttctcttcctggatgtccagattgagttacttgagaattagcagtaccccatagagcaactccattttcggcatcattaattcctatgtgacacctttccaatacggctttggatctgtttacatattcattattccgattcaattgaacaatatgatgtggagtctgtccagcagcaacaggcctataggcattttccatagctttttttaatttataagcatgagataagcctaaaatatcaagtgctatgttagtagaattaacatatctatatattgctaaaataccagattttaatcctataggatcttgactcatgtaactaccaattcttggttcataatacctaaaacggttgtagtataatcccgattcctcatccacatattgcccttgaaacctgaatggacaatcaaactccattcctttatttacagtaatcacttttccataaatatctagtgtacaatcccaagttttgtttcctttttcatcgtacatctgaataggtgtacccaaataatcggacacaatagaatattgcttaccatcctgtatctttgctgttggtacaaacgtgcctgcttcgaacacccaggtggtaacatcttctgccggttcttttggaaggatgttttcctcttcgtccgattgtaagccaacggctttatagctccattcgtgtaaaggtacgtttccgtcccacacccagcgtgtgacctttccgaaatactgtttggcggtgcgtcttcccaacgcatcgtaacggaactccaccggtcttccgtccggacgtataaccttctttagcataccattggaactccactcgtagagccatcccgtacctgtagccagacagcggacgccgcgctccttctccatgcgcttgcggtcataccttacgcccgtttcctgcaaccgtttgaactcacggaaaatgaggtttccttcgtcgtcgtagtgatagaaacaatccgggtcttccaacagttttcccccgggaccgtatttgcggtcttttttgtccggtgtctcaaagaggttgcccacgaagtccggtacgcggtaaatcacgtccgtttccgagccctggatggtttcctgccggataaggaagtcgaaacggtcgtagtcgtagcgcatgaccgttcccgtcagctcgttctccttggcgagcaaccgattagcgacgccccactcgtagcggtacgccccgcgctcgatgccgcccgcgcggacggacttgcgcacctcgcgcccgaaacagtcgcgctcggtgctgacggttacgccaccggagaaggtgcgctgcacctccagccccgtattgtcacgcacccacgatgcctgccagctctcgcctgcctgcatggtctgcaggttgccttcccggtcataagtgtgacgaatgtccgctcccagactgctggtgatgcgggtgcagttgccttcgctgtcataggtacggctgacggtgtattctccctgcctttcctctgtaaccagtcccgtcttcctgtcacgggtgaattccagcaggttctcgctgtgtttcgccctgacgagcatgccgtccttgtcatacgtgtagagggagacctccccgtcatactgttcctccttcaggatattgtccagtccgtcgtactggtattccgtccattttcctccgggacggttcacacgggtgacacgacccgcgccgtcgcgctcgtactcacgccgcagaccgtcgaagccggtttccgtaacgacctgtcccagcccgtccagctcgaagaaatagttgtcgcccacctcattgccgatgcgccggagctgcaactcgctgttgtagccgaatgtaatccagtgcctgtcctgctcgcggcttttcaacacccccagcgccccataggtgaacctgacctcgcggatgttgtcgctggcatgtaccatgtttcccatggcatcgtactcaaaccggtgcacgttgccgtccggttcttccagccgtatcaggttgtccgcccgattgtaggcataacgggtaacattgcctttcacatccaccgcctgcacaagccttcccctgccgtcgtactcccaccggcggaacagcccgttggggaactgcagcagctccaggtcgtacctgtcgttgaacgtgagcgtgtaaacccggccctgtccgtccgttatggtacgcaacacgcctccctcgtagacatatttcacagtttctccacccggtgtggtccggctgacgacccgatcctgtccgtcatagtcccatgaaagcctctttccgcacggagtgtagagcgagaccaggttgcggttgttgtcatagtccaggaaggtgtcctccccgttctcgtccgttatccggaccggcagtccgaactcgttgtaggaagtcttgcgggtatagccttcggggttgaccgttacctccagctcctgaaagctgttgtactggcggcgggtaattcccccgttggcatccactatcttgtagatgagtttgtcctcaccgtaataatattcggtttcggcattttccccattgcggatatgggtatatcccttaccgtaacggatgaaatattccatcacgcctccatcgccccatgtatgcacacagcgggcattctcacccttaccctcgtattcccaatggaaggacatacccccttggttggtaagctgtaccagcaggtgcccgccggaatagacgaaatgcttgctgacatccagcgcgtcaatggtttccaccatgtcgccccggtcatcgtaacggtagcggaccagcttcacctcctcaccgtcctgatttacggaaacgcagagcacccgccccgactcgtcggtttccactttcaggaattctccccgtgaggatatgattcctgccagccttccccccgaagcgtattcgaagcggagccggaatccgtccttcgtggaaatgcccgataccatgcggtaaccggagcggttttcgggaccgtcaaaacggtattgcaacccccggatgtccgtaagcatgtaaccccggccatcgagtgtccatgccagctgttccctgcggtcaaaatgggattctccaagtttcagcgcaggcaggaaggactcccgtccgtcagcatgacggaatgcgaacgccccttcctccaactgccgtattcccagattgtagctgtggtgccaattgtatcccaacggaccgtccacggcggcatcactgtaataggtacgttcccatacgacgggaatcggacccggaagctcgaagtccacattggtgtgatagaccctgcccgtagcagcgtccaccggctcaccgaatatgatgcaagctgttttcttgagaatcctggcaagccggggattcaatcccgccttgtctatcaatccatgcagcagatgggatatttttttcccgagctttgacaatcctttcagccccagcttcatcgccagcgcaaacacatcaatggtaggcggtcctcccacaagcacgggatttcctacggatgtgatggtggagagcatggaagtgggggcaagcagggccttgctcaccttcctgggcttccccttgcggggaatcgtcggtattcccacaatgttgcatgagagtgccggatgtgtgagggaggaacagggcgcaccgtccgccaggacagtggaactgcccatccacatctcggactcggacataccgctgaccaacggggccggatgcaatacaaatgccggcagatgcacgatgccgatacctgcctgcgcaatccactggttatgcaccttgaccgacggagccatgctcttgaggatgttgcacgccactccggccactccatcagccgcaggcggcatggcagccgccatgccggccatgaggtctgccatgaggtcgtacaccttgcctacatgaggcacaggcatgatgggagagggaggggtaacggtaggatgcatgtctatcccgatggacaggtcgccgaacttggcgacaggcatacccggcatggaaggaaggattccgcccagacccgcctgaatctcgtccaaagccgccttggaggctgaaaaaaggtcggcaaagccccgtctgacgctgctgctaccggcggcgtcagctatattcttgaacacatccggcataatgaaactttttgattcttgtttttaaaccgattggtcggtctgctttttgcaaatgtatcatttaaaatcaaaaaagaaaaacattctcctactattttctatcaaaaatcataagacaatccataaaaggcaattgatttcaagtcatgtatcaaaaaaacgtcgtatatttgcatctgttgaagaaaaaaggagagtaaatggactttgaaggagaatataccatacggacggcttccaaccagcagacatacgagccgaataccgtatatccggacgcagtgctaaatatagcccgcgaatcggcttccgtgttccaactgaagcggaaatgggaaaaaactcctccgatgctgaatctgacccctgattttcaacggggactggtatggaagaccaaacagaaaagcgagctgatagaatccatactgatgggtattcctctacctctgatttatgtgaaggaagatgagaagggagtgtatcttattgtagacggcaagcagcgtctgagcaccttgttcagttttatcaacaatgaatttgccttggacaaactcactatcctaaaggacaagaacggttcccgattcgcagatttgactccgttggagcagaataaaatagaggactgttcgcttaccttgcatgtgattaaggcacctaccagtgaccgggttacctttgacttgtttgaccgggtgaaccgtggcgggacgcggcttaacaatcaagagatgcgcaatgcgctctatcagggcaatgccacgaaactgatcaaccggctggccaagaaagaggtattcgttgaagctacagaaggttccattccagacaaccatatgaaagacaggtatctggtactccgttttacggctttttatttgtggcagcagcatatcaccatagacccggacacccatgagcctctggattaccgaagcaatgtagaggattttttggggaaaacgatgcgttttctcaatcagctggagccggaaaacggtttgtttaaagaactggatagccggtttacacgtgccatggagcttgccatacaactgcttccgtcaggcggcttcaggctgccttcgttacccggcaagaaacggccgataaacatggctttctttgagagtttcagttatcttctgtcaagattgaacggagaaggggaacaattccatcgtcaggttcaggatacttatatgcaattaatgtgcaatgatgcctatctggattctctcacacgctccgtggatagcggaaagcagacctataagcgttatgaaattatcaaccgacttattcatgaactgaatttatgctaaacaatctgactgtcaacaattataaatgcctggtggaatgttcgttggaattaaaacctctgaacctgttcgcaggtccgaattcatcgggaaaatctaccgccctgcaagccttgctgattgcttcggataacgtgacggagcaaaaaggcaaacacggtctgaagaaccggagaacagaagcgtcgaatttcaatgatgtaaggaactttgtgaccaatgccaagtcatacgaaatctgtatttcgtatcatggagaagatccgacccggctttgttttactccgggcgatgactcattccaaaccacttttgtggaacaatcggctgacgcatctccgaacctgctgggagttctcggaagcgagaacctgctgtacctgcctgccacacgccccggtggggcatatatgcatcccgttaatcccgattcggaaaacaagctggggcgtaacggggaatttgtgatagactattacgccaagcaccgtctggatacgctggatgccgcattgatcctggctcccggcactcaaaccctggaaggtcaggtgaattatcaactggacaggctgaccggttaccggctggtggtggaaacagtaggaagcaatcattacgtaaaatatgaaacgcgcagcggcaaacagcttctcccttaccatgtcggtaccggagtaagctttatgacggaagtcatcatagcttgtttcgcgaccccgaaaggcggcatggtgattacggagaatccagaaatccatctgcaccccaaggcacaagccgacctgattgatttcatggcaaagatagcgaaagccggtgtgcaaatcatcatagagagccatagcgaccacctgtttaacggtatccggcgcctgatcagtcaggaaaagttggccttgtctgacgttgccgtgtacaacttcagacaagacgggaatggattgacccatgccgaacctgtggaatttaccccacagggaggaatccaatcctatattcccggcatgtttgagcagtttgatattgatttggatgccattttaaagctataagactctatggacggtatcattatcaatgaattgtcattgaacggacagtttttggacagccgggatttctggaaaaacggaatgcctccgtttcacaaggcattgcaggatgccctttcacatggagtgggatatctgttcaaacaaggaagtttttttgctgcgcaagccactcccgacaagactttacacgatttgctgacagcaccggaaacccgtatcatcgatgaagccaggctgtataaaagtacattggcacgtgccatctgtaatccgttttgggatgaagctccccaacaggattccaatgcccaatattcagtaggtgaaaccgatgtatccggcagttcagttgccgaagcagcagcccgctcggtttgtcttctatcatttattagatccaggtatgagaagcatctggttgccgtaaccaaagatgaagaaccaatcgaggttggtaatatctggaaagagaagcaattgtactctatcttgtttgaaaggggtgaactatctctcgaaaagtatattaccattcgtttcagtggaggcaagcttgatttcagccttattgatgacacgctgggtttttcccttattgacggcgagaatcagaacgaatttattgattcattccataaatttgaggagttggactggagtgccattgctacagataatggattggattataaaccgtataacaagaacaagaaaagcaagcgctatttttcggatgacctatggaagaaaggcattaaaaagttcagaatcactcagcggaacaggtgtttcggctatgtggagaatggtgttttttatgtgttgaggtttgatttggaccatgagctaagcgatgttggataatgtttatagccccttggccttatttttataaaaatagaaagctgtgcaaatttataagattggcatcttgcttatctccatatactttcagtcggaaattcaagaattacaaatcctaatacttataaccggcggatttataatccgccgggacgggtcttgtaacttaacaataaaggtagtgttccaataattaatatgtaatacatttgttttgatactacctgctattgtactaaaaaattaagaatactcccaatatgcaacaaaaagattttcaatattttcattttctattttaccatatacatatatacttccactcataaattctgagatgcctctcattccaatttcgttgatttgaaaaatgaaatcatatccatcttttgttacttttccatcattatccaatccccattgtattggtatagcttttcctccaaatttgataacattatttttttctggcccatctctgtcttctcctatttcatataaggaataaatatcatcaatttcgggatgtttaaatttagtacaattactctgttcgcttatttcatgttcaattagtaatactttgcaattaggatatgaattgtattctaaggaagtatcaaaatctggagtaaaaatagagtattgtctttctttatttaatgggctttgcagggttaagtagaaataatatttttccatattagggaaagaaatattatctaatattttaggagcattacccccaacccaactattacagttttctttatattcacatatatcataatataaagcgtcttctctagtctttaatatcttttttatgttcataactattttatgatttacatgttattaaattatttgctttagcatgtgctattgcatcctgtctgagtttctcgactaatgcggttgctttttctttcgcagtttttctatccatgccatcagctattaacccttccattattcctctacgtgttaaagctgcatttttgtttatattttctagtgcagattgtcctttcaagtttttacctttcatcccatatctattttgaagagcggtaattctattgtgtatacccttttctcttaatgcaatagaagggttttctttagaaattaaatcaactcctctatttttacttgtgggaagtttattgttctgttcaagccatgcgtgttgaaggagttcgtgtgctgttaaattgtcaccaatattcgccctactgctaatattgccataagtatcgatgtcaaattctttggctacaagtccaaaaatatcaatacaaagattgacatttttgacatagctataaaatctttcacctgcacttagtccaatagggtcttgacttatataattaccaatttctggttcgtagtacctaaagcggttgtagcataatttagtttctttatccacatactgcccttgatagcggaaaggacaatcaaattctgttcccttatcaatggcaagcacttttccatagatatccagtgtacagtcccatgtcttgtttccttgttcgtcgtacatttggatgggggtacccaagtagtcggacacaatggaatattgtttaccttcttgtatcttagctgtaggaacaaaagttccttcttcaaatacccaagtggtaatgttttcaatcggctctttctgaaaggattctcctttttcatctggttgtatttctgtagttttgtatctccattcatgtataggcacgtttccatcccatatccaacgtgtgaccttcccgaagtattgctttgccgtgcggcgccccaacgcatcataccggaattccaccggccttccgtccggacgtatgaccttcttcagcatgccgttggaagcccattcgtaaagccatcccgttcccgttgccagaaaatggataccccgttccttctccatacgtttgcggtcgaaccttacacccgtttcctgcaaatgcttgaactctctgaaaatgaggttcccctcatcatcgtagtgatagaaacaatccgggtcttccaaaagttttcccccggcaccgtatttgcggtctttcttatccggtgtctcaaagaggttacccacgaagtccggcacacggtaaatcacatccgtttccgaaccttgggtggtttcctgccggataaggaagtcgaaacggtcatagtcgtagcgaatgaccgttcccgtcagctcgttttccttggagagcaggcggttggcgattccccattggtagcggtaagcccctttctctatgccgcctgaccgtaccgacttgcgtatctccctgccgaaacagtcgcgttccgtcttgacagtcacaccgccggagaaacttcgctgcacctccagcccggtattgtcacgtacccaggatgcctgccagctttcacctgcctgcatggtctgcaggttgccttcccggtcataggtatggcggatgtccgctcccagactgctggtgatgcgggtgcagttgccttcgctgtcataggtgcggctgacagtgtattctccctgcctttcctctgtaaccagtcccgtcttcctgtcacgggtgaactccagcaggttctcgctgttcttcgccttgacgagcatgccgtccttgtcatacgtgtagagggagacttccccgtcatactgttcctccttcaggatattgtccagtccatcatactggtattccgtccattttcctccgggacggttcacacgggtgacacgacccgccccgtcgcgctcgtactcacgccgcagaccgtcgaagccggtttccgcaacgacctgtcccagcccgtccagctcgaagaaatagttgtcgcccgcctcgttgccgatgcgccggagctgcaactcgctgttgtagccgaaggtgatgtggtgccgttcctgctcgcggcttttcagtacccccagtgccccataggtgaacctgacctcgcggatgttgtcgctggcatgtaccatgttccccatggcatcgtactcaaaccggtgcacgttgccgtccggctcttccagccgtatcaggttgtccgcacggtcgtaggcataacgggtaacattgcctttcacatccaccgcctgtacaagccttcccctgccgtcgtactcccaccggcggaacagtccgttggggaactgcatcagttccagatcgtacctgtcgttgaacgtgagcgtgtaaacccgtccctgcccgtccgttatggtgcgcagcacgcctccctcgtaggcatatttcacagtctctccgcccggtgtggtccggctgacgacccgatcctgtccgtcatagtcccatgaaagcctttttccacccggagtgtagagcgagacgaggttgcgattgccgtcgtagtccaggaaggtgtcctccccgttctcgtccgtaatccggaccggctggccgaactcgttgtaggcagtcttacgggtatagccttcgggattgaccgtgacctccaactcctgaaagctgttgtattggtgacgggtaattcctccgttggcatccactatcttgtagatgagtttgtcctcaccgtaataatattcggtttcggcattttccccgttacgaatatgggtatatcccttgccgtaacggatgaaatattccatcacgcctccatcgccccatgtatgcacacagcgggcattctcacccttaccctcgtattcccaatggaaggacatacccccttggttggtaagctgtaccagcaggtgtccgccggaatagacgaaatgtttgctgacatccagcgcgtcaatggtttccaccatgtcgccccggtcatcgtaacggtagcggaccagcttcacctcctcaccgtcctgatttacggaaacgcagagcacccgccccgactcgtcggtttccactttcaggaattctccccgtgaggatatgattcctgccagccttccccccgaagcgtattcgaagcggagccggaatccgtccttcgtggaaatgcccgataccatgcggtaaccggagcggttttcaggaccgtcaaaacggtattgcaacccccggatgtccgtaagcaggtaaccccggccatcgagtgtccaagacaactgttccttgcggtcaaaataggaatctccgggtttcagtacgggcaggaaagactcccgtccgtcagcatggcggaatgcgaacgccccttcctccagctgccgtattcccagattgtagctgtggtgccagttgtatcccaacggaccgtccacggcggcatcactgtaataggtacgttcccatacgacgggaatcggccccggaagctcaaagtccacattggtgtgatagaccctgcccgtagcagcgtccaccggctcgccgaaagtcttgcacttgatgggctggagaatgtccgccagcctgttcatgccttttttcctcagcctgtcgattaggttttggaagcggtcgcctatcttcttccacatcttgcccaagcctttcagtccgaacttcatcgccagcgcaaatacatcaatggtaggcggtcctcccacaagcacgggatttcctacggatgtgatggtggagagcatggaagtgggggcaagcagggccttgctcaccttcctgggcttccccttgcggggaatcgtcggtattcccacaatgttgcatgagagtgccggatgtgtgagggaggaacagggcgcaccgtccgccaggacagtggaactgcccatccacatctcggactcggacataccgctgaccaacggggccggatgcaatacaaatgccggcagatgcacgatgccgatacctgcctgcgcaatccactggttatgcaccttgaccgacggagccatgctcttgaggatgttgcacgccactccggccactccatcagccgcaggcggcatggcagccgccatgccggccatgaggtctgccatgaggtcgtacaccttgcctacatgaggcacaggcatgatgggagagggaggggtaacggtaggatgcatgtctatcccgatggacaggtcgccgaacttggcgacaggcatacccggcatggaaggaaggattccgcccagacccgcctgaatctcgtccaaagccgccttggaggctgaaaaaaggtcggcaaagccccgtctgacgctgctgctaccggcggcgtcagctatattcttgaacacatctgacatggtgagaattttttagaatgtgaaaaagagacaaccgggtgttccaaccggcacactccggctgtccctgtaaggacttacctatgcatcctgtgcatagtcgctgttccagtcgttctcgtcatccccttttgtaccttccaacttgatgacaaaactctttgccgggaaataaggagtcaggtgaatgtcgaggaaaatacggtctttctgcttcggatcgcgctcgaaacgaagaatcttgaatttctcaatcaagcgtccgggaccctgtatgctatccaaaaacttgctgatctgaccacgcaaatccctttccgccttgctgttccagttctcaaaggcacggcggttgaggaaatccatcagcactttcgttacccaatcgaacacacggactacggaataggtctgcaatcccaagttgtccccgttgaacaatgtcttggcagagaaagccatcaccttgccgtattccttcaccatcggaatcaggccaatcttctcgatttcggaaatctcgctttttttcaggttgaaagcaaccccgtccacctcgctcatggaaccatacttcttaccggcggtaacctgtgccattaccgtcttgtacacactgccggccaatgccgcagaaggaggaatcagcaagtcttcggtttcgcccagttccgcatagcgtccccgtcctaccagatagttgcaggtcatacatacgttggacttgtacacatcgcctcccgaaagattggaatcaaagaacatttcaatgacatcatccggtttttccagatcagcgaaatccgtgtaaatcatcaccttgttgtcatgcgcaatctttgcccatttttcaacaaccttgttggaacccaaatatcccgggataaccagcagggaatagttggtacgcaagtccaaacggtcataattcgcacgaagctcgttagcaatggcatcgataaagaaggagttgtccaaatcggtaagctggctcatcgaagcgttcacaatggagatattcttgatcttgtcggaatccgtattcttgtagaagagcatgaccgtgcggtaggacttctccaactgcctgacctcttccaccgctttcagctggttctgggatagcagaccggacaccgccgcagacttcttctggcacagttccaccatctcgctgatggatttgttgcctttcaacatatcgacccacatctcaagccgtttttccagttccttgcgctcagccgcccgttcggggtcggaaaggaatatgttccgccgtgccttgcgctccggattcatgttctgtatgccgtccacggaagattccaagacattgaaaccgccaaacttagccagaatctgcaattcagcgttcagatttctggactgcgccacagcctgttgctgctgtacggctgcttctctttgtgtattctgttcgctcataactatcattcattagtggggttagacttctcattgttcttcaaatcgtccaaaatggcagaaatcgcattgacaaacgctccacgtgtctccggattttccagcacccgttgcagcaccttgttggaacgcaacgacttctccatcctgtccgcaaactgcttttccgcattcaggccggacaagaatgaactctgttccgtcattttcctgacagaaaaatcaccgacattgtggaaacggaaattttcctctacgggagcaccgtccgcatccgcgaactcgatatctatttccggccggaaatgtgcaaagacttcgtcaatgttggtcagaccggcaaccacttcgggagccaccggctcatccttcgtcagctgttccaccaataaggttcgattttgtggaatttccgcaataccttcggaagcgtcaatcttcacttcgtttccgccgattccataattaccaagatccatacttattcaattttaaatttaaaatatatattaattaaatctcgctcaactgaaaaaacttccccttcttctggccttcgcctgctgcatatccggattgtccaccagttccttccaatcctccccaatccattcgcagagctgccgttccaatatcccgacatcaatcggagcacgaaccagccttcctgtatgaagagccagatacgccgcataaacgaacgtggaactccgcctgatttcggcagaaaggtagctgcctcctgccagggcaagcaaaaaatattcgaaagcctgttccatctttccatcctcatagcgcaggaaaccacacatgcgatagccttccatgacataataagggtccttttgcatgacggcttttttagccatcatgtcatacaaggcaaccgcttcctcccgttttttcccggctgtcagaatggccgctttcatggaaacagccattttccaataactatatcctgccgtttcaccgccctgcatcgccttttccgcctcccggacggtttcgtcgctgtatttcatgctatgcttatattccctgatagcataacatgcctcggatgcgataagcagagcggaaatccggatattcgtatcctttatttcctgtgcaatatccaacagttttcggatttctctgtccaataatttccaatcctgcttttgtgtagaatccatgacaaccgtaacctgctgcttgaaccgattttcaggtgcaatcaggtcgttaccgctatccgaccgtgccatccggttatgcaaagccgccgccatatcgaactgcgggcgtatgcaaaccacttcccgagactcacccagccggatactcctgttctttttcaagtcaatggttgtcatccggattccctgcgggacaccttctttcagcacattgccgaaccatcctgtccgggaataccccctttcctgttccggaggaaagtacagacagaaaaaggcatcatccaaccgggagatacatgccttgaaacgcaacatctctctccacaagttgcccgccgtatgctcaaccgacacatcaggaatgtattcttccttcagcagcccgtcgtgcctcagagccctgagaatatcatacttctcctcaaccttttctgaaaaccaacccgcatattcctgccagagctgttcagtgtattcctcgtcatcccccctgtacggcgtatcaaaacgaaagaatatgtcatcgaactgccctaccggagaacgttctatttccagaaacctgtccaccaagtccacatcattctgcccgacaatccatacagacagtttccagtccctgttgccgactatgtccgcccagtaatcgactgctttgtaatattcctgtatcacagatgcagatgctcccatagccaaccgaattatgagttaaactttactattcctcccgaaaccgttacgtttccctttccctctatcatcagatttacaccgttgaccgttccgttctttgcagcaacatcgtaatcctttgccgcctcctgtttgatattggtaccgctgctgctaattatactcttttcgctgctgagcaccatacattcgttgccggacagcaatgttacacttttcctgccttcgagagcaatggtatcggcctgcaagcctatcgacttatcatccattacgatgaccgattccgcctcgttggtaagggtaatgcttcttttcgccatgacggtaatggcatccgtgccatccaatatgatcagctgttttcccgtctggtcggtaataacgatgcttcccgtctcatcgtcgaaaacgatggcattgccgctgcgtgtgataatgctcttgaccttgttgtccttgtcccctcctttacctgaaccggaatggaacaccgatcccgtaacataggggcggtccgggttgccatgctcgtagcttaccataacctgatcgccgacttccggaacaaatacccatccgcgattcttggaaaccgcaccacttactcccgcattaggagtctgcaccctgatccaattggttgtcttgccgtttttctgccagtcgaaagccactttcacacgtccctgtcccttgtcgtcgttgttttccttcaccgtagccagttccggcaacgccaacggtcgcttcacatcgggaacaggaatatgtaccgtaccgtccggcacaccgacaaaactattggagtaatgtccgtcacggcgtacctcatgctcaatcccgacaatacggaacttgcctaaaggaggcagtttcatcctgtcagggaaagaaacatcgatgatttcaccaatccttatccggcaagtctttcctatgcctttgatgttcagaagattggcaccagacgcattctttacaatcctcatctgttcgtccagttccgccttgtccgttacatgggggtcggcagccgaggtcgtttttgcagtatatgccttctcagagcagctgtgtgcaatagactgaaggtcgttcatgccatccggtttggcaggcgtatccgcattatgctgtttgttctcctgcgctacataatcgtatcttgcggatttacccggtaccagattggcaaccagacgtacctcctccaaatccatgtcataaacaatcttctccgtattgtccctgtcaggcttgccgaaatacactttcgtcccgtcataatagaaccactccccataaagagccgaaaggcgattcataaagtcaaagacactctcgttatactgcgccatgtagggtatgggcgccgcatacttgggattggaaaccaaattgacctttccatactcctgcgtcacctcctttattatggtagagagggactgatccatccaagaatcgagtgtcctgttgttctcatacagtatcgtagggcttgttccgtgaatggccactccgcctgtctcgcccatgcttccaaccatttccacttgagtgatgattccctcgaagtcataactttcacccgtctgcctatggacaaatgaaatgctggctgtctccccgatgtagccgatgaatttttccggggtctgttggaacgtattgttaggcgacagataattcaccaccacagtgaaggtgtgatgccggttgaaaccctgacggagatgcagtgaaacgaatttctgttcttctcctttcacggttactttagtagccaccaaattcagaaaacttgctcccatactatcttaaactatgattttaaataaataatccgactggtcggtatgttttttggtgccgaaataaccggaattggtatattccggcaccttaaaactttgattaggaaacaaccattagttgttttccggccaatcctgtacaaatgtagcctcgtccatcttcacggtctgtgcagaaatggcgaacttgattgtcatcggataagggttagccacattcagtgcctcttcgtaatccaccacataaccattttcgaacaccaattccttcattttggcatcttcatccgctttcttgaagacgatgtttccgtttacgggctggtactgcttgaacatcttatccagcacaatggtatcgggagttgattcgatttccacatagattgtgccaccataaatgtcagatgccggacggcctttggggtccacatcacgattgaacttaactctccaggtcagtacatcaaactctcttgagtccgaaaacttaaatgacgctttaaatgccatattctcaaagttttaaattaaaaaataagttgattttgaaatatccggtcaaaggaggcctgctacagtcctatctttgtccttcaatttctgcgcccaatatatggcattttctgaaaactacaaagaacttttgatgattttttcttgtttttgccgaaaatatgcccataagcataaaaaaaacactgccaacaatagccgaattattttttttgccttatatttgcaatgttctcctgcgcaatttttaaatcttacgattatggaaacaggagttggtttcatcaatcttgatgattctgtaaaaattgcgcttaacatagcacttgcagtggctcgtgaaaatgcgaacgagtgttatacaccctcgcatttgttgaaggctctacttcataaagatgtagggttaagagattttataataagtataggcaaggatttaggctatctggaggaatgggcggacgtgtatatcgaacaatgcccgaaatccacccagttgtccgaaatcaagccttcggaacggattgacgccgttttccgtgccgcagacgatgcacgaatccagttcgggctgttcgacatcaatcccatctgtgtgctattggcactggcaaagcccggtgtcgctttttccagcgaccagctcaggtctttccccattctggaaaaggatatccattccatatatataggtaacgggcagccggcatgtccttctgccactacggagaagtcctatgccccgacttccgcctcatcctccttcttgggcaaatactgtgtggatctaaccgaagatgcggccaacaagctgcatccggtcatcaaccgcgaccgtgaaaaccgtatggtcatggagatactgggaagccggagcaagtccaatgtcctgattgtcggtgatgccggagtaggaaagacagcactggtttacggacttgcctgggagatagtcagccataaagtgccctcgtttctggaagaaacccgtgtatttgaactggacaacgcctccctgattgcgggagccacctacaagggggaaatcgaggaccgcctgaaaaacatcctgaaagaattgcggaatatcgacaatgcaatcctgtttattgacgaaatccatgtattgctggacaaccgacaaggaaataccggtgcgggaaatgtattgaaatccgaactgtcgcacggcgacctgaccgtcatcggcgccaccaccattgacgaataccgcaaaatcatcgagccggaccatgctttcagccgccgtttcgaggtcatacaggtaagcgaaccggacataaagtccgctatccagatgctacactccgtgcagaaacaatacgtggactaccatcatgtaagaatcagcaacgaagccgtagccgaatgtgtccgtcttgccaaacggtatatcaaagaccgccgtctgcctgattccgccatcggtctgctggacatgacgctctccgccatcaagatggtcaatgaaacaggaaagaagaatgtggagaccctgctatccgggctggatgaaatagaaaaggacgaaaaggaccttcaggaaaagaccgaagaactgaaaacgctgcttttcgtaatgcacaacaaattaagccccatccttttaggagtcatacccgatgaagcggatatccatgaattgcaggagtatgaagaactgaccggctatctgagaaacgcattgaacgtcctcctccaatttgcagagaagaaaatagaggaggtgggtatctatgaggtagccgccgttgtcgccagcaagacaggcatccctatcggcaagatacagtcgcaggaaaaggaacggctactcaatatggaagattatctgaggcgacgcgtcgtcggacaggaccaggccctgaagacattgacggatgccatcctggaatcccgtagcggcatgaacaagccgggacagcccatcggctccttcttcctgctgggacccaccggtaccggcaagaccgaacttgccaaagcactggcggaagccctgttcaatgacgagaaatccatgatccgtttcgacatgtccgagttcaaggaagaacactccgccgccctgctgtacggagcgcctccgggatatgtgggatatgaggaaggcggcatgctggtcaataaaatacggcaacagccatacgccgttgtcctttttgatgaaatagagaaagcgcacccgtccgtatatgacattttcctgcaaatcatggacgagggaaaactgcatgaccgtctgggcaaggaaggggatttctccaactccatcgtgctgttcacatccaatgtaggaagcgagtggctgaccaagcaacttgagtccggcaatgttccgtccaccacccagatcatggaggtgatggggcagtatttccgtccggagtttctggcacgcctgtctgaaatcgttccgttctcccccatccgcgaagacatactcctgaaaatattcgacatacagttcaacggagtcagaaaacttctggacaagcagggtatcggcataaccatcaccgatgatgcccgtaagatgcttgcacacaaaggattcacacccaaatacggtgcccgccaagtggccggtgtaatccgtaactatctgcgcagaccgatttcacggcttatcatcaacgaggagctgggcaaaggaaaaagtctggaggtaggtctggacgaacagaatgaattaacctggaatattcaccaataatcaagtacactatgtttggatataccgtattcttaaagataggcaacctggctgcctcctcactgaccgacatgtacaaggacagctaccagctcatcggttgcgaattcggatttgcccaagggatagatatcaaaggacaggcacagaccgaggtaaaaggcggcacgttttatgtaacctaccctcatcttcccaaccgtgacatgatccagtggatgctggatgcccgtaaataccagagcggagccatcgtagtccatgacaaccaaggctccacactcgaaaagatactctttgagaaagcgacctgtgtggatatggaaatcagctatatccggcagggcaaaagctatattgcgaccaaactgaccgtacaggcacagaaactggcattcggtacagaagagtttgaaaatcagtgggtgttttaaaaacagcagcgttatgggactttttaattttccgcaagtggacagcaacgtgaatgtcatattcagcgttgacggcgacgaatatgcagtggaacagttcaaaataggttttcaccagccagtagataacctaaagaaccaaccggaaggcgaagtgcgtggaggacgaatcatgataaccctttcgcagacggtgaaaagcaacatctacggatgggctgtgaaaccgtgggtgaaaaagaacggggcagttctgttcaagactggaacgtccggaatcgtgtttgaggtggcgtttacgaatgcatattgtgtcaatctgagacgggttatagaggctttgggacaaggattgtcaacaagtctgattctatctccagagagtgtaagcgtgaatggtattgaatttgataatcggtgggtaaagtaatgggcgatattctgaataatagaataataactctagaggattttgagtttctaaaatcaataggagttccatatacaggttatgtcaagggtattggatatacctgtcctgtgtatatgccagcacaggctttcaggattacagatggtaatgtgcaatggagcagttgtgagttacaccctcttttttatcaagctatagatgatagtccagagcgcatctttttgagcatgggatacactactgaagatataattgaaagaataacttatgataatggtaatggaaccataactgttgctgtgggaaaccggtctgtaacttttccaaaagaacaaggtaaggttaatgtgtatttgaatcaggaaggtggtaattattttatttatatagaagctacagattcaaaaggaaatattcttttgagtgattcaaaaacgattcgttcttatatacatgagaaaggaattaaacaagattttgacattacagatggagtgggctttaataaggaaattcttgataatattaatacaggaattggagcttttggtattgggttaggtgcgaaaactgaaataatagattatggaataagaagttttcatggttattcttggaagcagtttaattcactcgataaaaagcagcagttacttaaagaggctcaagcaattggaaaaaccgggactaaatatttaaaaggtatgaaaatgcttggaaactggagttcgtatgcttctgctggttattctgtttccttaatatttgtagaagatggaagaacattggaaaagaaatttgttaaagcagcattagatgtgggatttacctatataggtatattgggaccatggggatttgctattagttctatttactatttggtggatacagctacagatggctttggatattttaatgaataaagttatgcataaaatcttagaatatttgttttataaaattcaagtattgactcgatatatggacacaagtatgtatttaaatatacatgttccatttattatgtctacagtcttattattctatttggcagatattgcaattatatactattatattataatgggatattcaccacaaaaaaatccaagtaatgtgtttttggtggttttcattattatgattttattatggagtagtctctatttttattatcggtataaacatagaaatgaacgaattatggaaagaaaaatttatgaacatagttctaatgtatgggcatatcttttcatatttactccttttattgtattattaggatttgctttattttttagggtgtccagttctacgctctcgtttttggtattgatttaacaacttaagatattgattattaactataacactattgtttttaggtacaattttaacatacaaaaaagcatagctaattcattgaatcaatatattttaaagagatatgattatcagcactttggaacttgcatcatatcttttttgaactaaaagctggaacatcaaactggacaccctatttatttttttaatttcattgtttatgaaagagtataaggtattaataatttatacaatctccaatgatcaatcaaaaaagtcatttgaagaagaactggagagatacggtctggaacgggtcgggacgcaagatatctttgcccttcccttagaggaataccggacaaaggtacaggcattcaaagcctacctgcgagcctatgtacgcaagcatctggacagccaagacacggtactgttcgttgaatcacgcatgaacgaggaacggaccctgaccgccatgctgcaaaccaatctgatgagtgaagaagaataaaataacataaggatatgagtgcacaatcgtatatcaagttctggacagccgaaccctcggagcatgaagaagtgcaggcatacgacctgctgggctacgagtatgacttccggaaagaaaccactcctaacggaaaggtaaccgggaagacctacggcggtaaaatacgggtaagcattgccggatttcctacagaggaactcttggaatggatgttcaattcaagaatcctgaaggacggagaggtgatgaacacttccggcctgcccggtactcccaaagagatcatccgtttcaagggagcaaaatgccttgatttcaatgtgcattcaacaaccaaagagagccgtacctcactattcatccacttccgggaaatggagaccggcgattcgtgtcacttaaacttataatcatgaactggttcacttcattgttcagaaacaaaaaatcctcaatgccggatgaccgctacgtgatgcggctgtccgtctgccatgagacatacagcattgaagagttcgacctgcaattcaagcggaatacagaccgtgacggattgcctgaaggtgaggcatacggcggattcgtcacctgtaccctcagcgggatgccgggtgacgagctgttgagatgggccgcatacagccactcccatgaagacggcgaaatacggatctacctgaaggagcaacccgaccaacaagcggcatttgccttgcgctttgtggaagggaactgcatccgtctgcaacgcaaggttgaccgtatctccaattccagcagcatcgtccttctgtttgccgcaagaacactaaaattcatagacgaagaatttgaaaacgaatggcactgacaagtatggaaacaaagttttgcaaattgcccctggattttgaagccttgctcagcgaggatgtggaaaacagccgtcttgcatcctgctcggaaatcgagtccatcgaccagtttatcgaactgctgatcagtacggctcccggcgaacatgcctttgacaaggagttcggctgtgagatcttttttctcgactttgaaagcattgtctcacacacccgttgggaaggacaattctcggaatacataaccaaggcaattacccggcacgagaagcggcttacgggtgtaaatgtacgtgtcatcattgatgacaccacccgacaggacaatgtatttgatgctcccgccgtaaagaaacgtgtacaagtatatgtatatggaaccctggtacataccggagaaaaacggtgtttctattatgtaatctatttaggaccgatttcaacccgatgaaaggattatgagtacagaaaaatacaataaagagcaaatcagaaaccgtatgctgaaatacgctgcggctttctggggaataaaaaaggcggaaaacttcgacccggttgtcaagctcctgctggaagcattgtccaacgagatatatatgctgggagaggattttaccgccatcgagacaaggctgctggaaaagaccgcccgaatccttaccccggacatccttacctcaccctttcccgcacacggcatcgtacacgcctatcccatagaaccgtgttacctgataacccgggaatcgggcatgtattacgagagcgactcgcttacccggaagctatcgaccggaagcgtatcgttttatcccgcctgcgataccctgctgcacaaagccgacgtgaaatatatggtctgcgacgaccttctctaccggatagcccctaccttggagaagaccatgattgcccgtgcagagacaaggatgtctccgcgtaccgtctggttaggaatggcggtggatgaatccatttccgaccttgaagacttttcgttctatctagattttcccaaccttacggagagctatgaatatctgctcctgctcccctgtacggaatggtccgtagaagggaagacagtcgtgatggaagggggaatccatgaaaagacaaccatacagaaagaaccaacccgtgcctttttccaagactatgacgtaatgtccgtcatagacaaggaagtcatggatatttacagcaaacattttctgaaggtatcgcagtcctttccactcgacggttcctgcaggaaaaaccttccggacaccctgcggtcctgtttcaaagaggccgttctggagaagatgcaggacaagctggtatgggtgaagatacagttccccgcccatttcacaacggaagtccttgaagaacttcatgccggcatcaacatcgtgcctgtagagaacaagacgcttcacgaacagacgaccacccttgaggaaactttcagggtgatacccttgcgcacgggcagctacgaatcccttctgtccgtacacagcgtgaaggattctgacggaaagaactaccatgaactcctctattccgcaaaggattccacggaaagctatggaacctactccatccgcaaaggaggatgcgagcgtttcgactcccgttccgccaaggagctgctcggctatctgtccgacctgctggatgacgagacccatgccttcaatgccgtatcaagcatcaagctacaggcacttaccatccagatggagcagctgatggcgcaaatgaaacagacagcggacaacatgaacgagttcagggaaacaccttattaccttatgattgacgaattgtccggcaaggggcagattaccgtcaaatactggacaaccaactgtgaggtaggaaaccggatacaggcaggcgtaaacctgtcccccaatgccaccacttacctggacccgaagacactggctctggtcagtaccacctacggcgggaaacaagccccccaaaacagagaacggattgacatctacaaatacgccttcatttcgcacggccgtgtcctgacacagaacgacatagccagcttctgcaaaaaagaactcggagaactgctggtgcggacagaaatccggaacggggtggaaatcagcccgatgccgcacgaaggactgatccgaaccaaagaagtccatctgattcttggaacgaaactggatgagccttcgcaggaaaaacagataaaagacaatctgcgtaccaaactctcggcctgttcgccggacacattcaactaccggatattcatagaatacaataaagcataaataccatacttatgaacccagttacccaacatctcatttcatcgtacctgctgatgccgctgctgaccgtgattttcggaatcgcggcctattttatcgcacgcaagaacaaactgctcaacaacaaaaaactgattgcgtatctgctgctgtgcggcataatccttgccctgcccggcctgtccggattcatggactataacttcatgccttatgcctacatcctgctggtcatcctgtactggactgccggatattacaaccggctcatccttcgcaaagtgttcgcgtcaagcaaggaaatgccttctttcggcatccaatgcctgctgacggttacggtcatgcttctgggagccggactcttttccgtagtgttcaacctctgcaacgaactccagtacggcatctgggcctccacctgcctgctgccctttgcatttccactcctgtattcccaaacggtgaacagctatttcgacatacccattgaaatttataaagtatggaaatattcggaggaatatgactcggataccttgtacatcaaccgtgaacggagcatcgtaatggatgtggacatattccgcagggtggatgaccccgcatcggaacgcataaccggcaaggcatccgaggatgtcatcttcgggcagtggttccagcgcatgattgacgactgcaacctcaaatcaccgtcttcgcccatcgtatataagaatgaaggaggagcctattacgaatgggtattctataccaaaccgtcctttttcaagagacggcgctatatagaccccgacgttacacttgccggcaacaagctgaaaagacacgatgtaatcatagccaagcgtgtggcaaacgaacttataaagtataacgaatattaaatagaaacattatgataggaaaacagagccaaaagaaaaaatatccgctggtaaactgggcggacggaatgcccgtcaacaaagggcatttcacccaacaggaagaccactttacggaccggttgtgcgaataccagtcgtttcatctgaaccgcaatacctacggactcctgccattcaagaaaggagaaccggtttccggcgatttcagcattacggaactcgttacaggcaccttggaagtccgattgaaacgttgccacgcccttacttccggaggttacctgatagattatgatgccggtgaggatgacgaactcaccgccagtttccatatccctacagaagaggaagaagaaaaggacaagcggtgggatgtcatactgatggcagaccctttcgagcatcttccttcgggtattccgaacgagaaggaaatcagtccacgccagcccaatgccttacccaaatatgcgttgagcgtgctgccgagcggacagaccgacggaagcgagctgggaagacactttctgctgatcggccgcctgcgcaagaacggaaaccgctgtgaagtggacggaaacttcatcccgccatgcacaagcatgtccagccatccggacctgaaaggctactataccaaattcgggcaactcgtggattccatagaaaaagcttcgtttgacatccttgccaaagtggagaatgcagaaaaacagaccagcctggccaccaacatcggtatgctgtgccgccatgtcatgctgttcatatccgatatctacttctccttccgcaacgaggggcaatactattcaccgctacacttcctgaatgtattctccacattggctcaccgcctgtatgtatgcctgagtttcatggacaaggaagacaaggaggacctgctgaaatacttcaacgaatggaacggcatcactcccggtgcctacgaaggcctgctgagggaaaattgcgggctgctgtacaaccaccacaatatccgccaactgatggttacggcggaacgtttcctatacctgttcaatgacctgtggacaaccctcagccgtctggaatatatcggcaagcacaaggaaaacatcgttgtcgccgaacgctccagacaaccgaaagaatcgagcgagtcacgctggaacatactggactaatcccctataagcgaacggacatgacggaagaacaagataaaatagtacggtttgacgaacattcccattcattcaacctgccggataccgacttcaaggcggaagtggtggccagcggactgaaagaggccgggtatgatgcagagcgtaccctcatattcagacggggagacatccggcgcggattctcgaaagacatccatgacatccacccggaatattcccattatgacctgacggattacctgtatctttatgtgaacaggagaagcctttatgacgagctgcccgaaggcatattccacaagaacctttaccagtccgagaaaatatcgaaggaacaggtgctggacgaaatccgcatccaccgcgaagaggaatttttcgcccgccgtttcttcaagcctttcgaaatctccctggaccatatgctggtagccttccagaataaggaacgccgcattgacgagatgaacgtacatccggatttcgtaagcatcttttccggtcaatggcccgtactggaactgctgccgacccatctggcggtcatgcttatccatatgctggcctatatggaacagattacagcgagcctctccaaagccggcgagtgcatgaccattctgaccggtgtgcccgtgcatatcaagagaggagacaaatgcgtggtggaagtggattcctgccttattcccaaattgggaagctgcattctgggagacgacatggttctgggaaacagttttgccgacggcacctaccagatgctggtagaaatcggtccactgtccgcccgacggatggagagcttctttcccggcgctgccgacagtaaaatactgaatgcgctgacagaactgttccttccctcggacaaggagatacagatccgctacatcatccagcaggaagatgcccggttcaggctgggaaccccaaccgaacaaggcgcctatctgggtatcagcacctatttatgaatataaaacatcatcctatatgaaaccgaaaaacaacacagaagtaaggaaagcctatctgagattcgcgggctatctgacatgctgcaccatccttgcggtaagcatctttgcctgtttcctgaaaacctccggcatagaagtaaagcgaatcacggagcaggcactggaatatgaccatatctatgccaaagagctgtccctgtcgaacagcatggactccatctaccagtacatgaaactgatgaacacttcaccgcaaataaacgacaagctcctgcaaagcgttgtcagtacgcgcaagatgaacctgctcaaatatgtccaaggcatggacaccaaagattgcaggctttacaggcagctgctggaaaacctcaacatcttcctcggggtaaaagactccatccgtctgctgaatatccaggaagagatggtgaagaaagacctgatgcagtgcatccaagacaactggaaaacaaggcgtaacctgaatgtgggttccggcggcaacaaacaataaaacggaaagccatggacaacaacagaaagacaatgaacaaacgggaaatattcatgggacatgcctatgtattcctgttctttttcctgacaaccgtagcgtgttgtctggtaatcttcatgtggaactcagatttcaagatgtttgaacagaaagagttcgtaaagatcaagatgaaccgcatcaaggatttccagcaggaacaagcggaaagccagttgccggtggactccctgttccgtaaaatagaaacatttgaaccgggcgtttacgcccagtatgaagaagacgacatccattatctgataaacaacctgcggaacacatacgaaaggaacagctgggacaagcgatacaagctgttcatgcacattgccgacttttatgccatgtggctgtccgacaggaaacagctatggagtatcggacaaaacataagtctgttcaaagccaatctggaggagtgcgagataggcttgcagaaaaaggaggaagacttgcgctcaggaactaaaaacaaatgacatgggaaaaatttataccagaaagattctgttcgtaatcgcagccatgctgctgtgcatccttgtcgccatactgatccggctgttcttttccagccgcaccgtgcgtatgacactgacccccatagaggtggaaaccggagaaacggtccattatgcagacagcacccgcaacgcacgctcctggctttgggaattcggcaacggggacatatcacacgaacggagcggagaatacgtgttcaagaaaccgggacgctaccaagtgcgccttcaagtggacggaggactggaaaggaaacagatcatcacagtacacaggagccgggatgattacggaagcgacgagcttgtcaggatgaaagcaccggcaaccgcctttcaaggagaaatcgtatctttcaaaggatacggtccgtcgaaagaatggcgctggcagttcggagaatccggaattgtcgattcgcgggagcagaatccactctacgcctatacagaacccggcatatacgaggttctgctgactacggagaatacccaatatccggtccggcacaccattgaaatccttccccaatatacggagaacgactcgacagacgtgcttgtcatcatcggcaatgacatccgtgaacacttgcaagccatcgtggacggcaagccgttcaatacccattacaattatatcctgaagaaatacctttgcggaaatccggacatagcggtaaccgtcaacaacagcaagaagaatgatttctattcctattgccaaggactgaaaatcatagcacgcaggaaaacccttatagacgaggtgttcgtcgatatgggagacaacctgagcaacgaatgtgtgatgcagctgatggtaacacagcacgaacgcttttccgaacaaaaaaacaaatgaggcatgaaaaagaattgcatatcgacactcataaaaggaggatggatttgcgggtgcatcatctgtatggcatcctgcggaccggtacaccgttttatgcggataaagaatgtaccccgtgaatatatgcgaaactattccatagaaggggtaaaggctccccgcagccagacactgcccaagcataccccgtggattgtctttgccaatgaagcaggaacatcctatctgagtccgagcggaaagaacgagatgcagtctgtgaaatacatggacgcatttctcgtcatcaagcgaaaaggagactggctcagagtcattcaatacgacccagccattctgaaaaacgggaaactgaaagaatggaaacaggcaaaatactgcggatggatcaaccaaaacgacctgttgctgacccggagcggctttaccgacattgttaccggattcaaaaacaaacaggtggtcatgctgaacgacagcgtggcattggccaccccaaaaacgtattttgccaacgactccgtaaaactgttcaaaaatacagacctgacacaagaggctggcaagattccattttacagtgtcgtatatccttatcaaatatcggaagacaaaggatgcaccctcgtggcagacaagccgcagcttgacgcagacagcatagggcatgctgtcatcggatggatagacgaacgcctgctgaccgcccccgaacagcagctccatatagacataacctcgctgccggacagcacgcttgtttttaaagacagggaacggaaagacaccttgccgctatcatccaacgacctgaagcggaaactgcaactttcggccagccagcctgctatccgctacagcccggtactgtcctaccggaacaatgacacgagcttctgcttcaaaacccggcttccgatgccggtcatcgacaaacgggaaagctatgtgctgaatgtcaacggcaatccaatctattacgggactttcaaaaacaagatagagaaggacctgcaaaaaataaacctcatgtttgtcctggaaggaaaagagaacaccatccaacggtttccagccgtggtgaatgccatccaaggactgcaatcgcaactggtgaatgacgacagcttttctttcaggttcggtgccgtgcttaccttcaacgaaccggacagccggaaagaccccatctgcaaactgactcccgactacatggagctgcttgatttcctttccgccaaagcacgtaatgccgagcaactgaaacctacatacggacgattcggcagctggtccggccttcggatcggagtggagcaattcaacaaatgtccagatgaaaccaatatcctggttgtcatcggcgataaagggttcaacagcgagtgggcagactccaccttggtgaacaagctggtaaaaaacaactgccgcatgatcggcttccagctctacggaggagaaccggataacttcaacaacttcgtgctgcaaatcgggaacatgatagattgctcggcaccacgcatcagccggaaaaaacgggaactgattgtatatcccgaacaaatcagaaatgaaaacgaatatgcggaggtgaaccataacacctattgtctggactttccaaatcggagcatgacacagggatggctggtgtttccgcaaaagaacgaatcgctggaactggaaggactgaccaccgccgtggattccatgctgatacaagtgaagtttgacaataccctgctgagcaacagtctggcaagggcattcgacgaagtgggtacacaccgatataggacagattcgacaatgacagcttattaccatatccgccagtcgggggtacaccccatgctatccgtacttccggataccgaacctgcctggagcctgcctgcacagccaatcgtactgccggactcgctgtcctccacactggactattatctgcttgtcaacgaagaggagttcaaacggttgagaaagtatgtggaagcaccctccaagctgatcgttgactataaatacgaagcggtcaaaaagaaaaagcaagcgaaggtggatatctgcgactgtccggacgactacctacaggcagatgccgaagaatctaccgtacgtgtaaagacggacagcctgaacgcaccggaatatgcctcaacccgccgtgcaaggagaaaactggtcagacatttcctttcagagcgcaacagggacagatattgcaaggtagggagaaagactttcctgagaatgcccctatcagaggtcttgcaaaggtttacctcctgcccgaccgactatcctttctttgaagtttaccgtgtcaaggacttgcggaaaaagaaaatgattacggatgcggagctggacatgctgattgaatatttcaaggaaaagaaaaaactgctggacgaagccgccggcaagccgttccagtccaacgggcagacatactattggatcagccgtgacctattaccatagtcattcacctgaaactgtattatcatgatttatgaaactattctgaaaataagaggaatggaggtgccgatactctattataactatcggtgccacatccggcactatgatgacccgaatctgagaaaaatcatacaactccacatccaagtatgcgaggaaatcggcaatcgggagtgtctgccggtcgagggagacctgattacgcttgcgtttgagtgcaagggtgaagaacagttcttctatgactggctgaacgaaggagccatgcacaacggggaaatccatttcatctacaacgaagtggagattgcggacattttccggttctgggactgcttctgtgtgaaaatagaagagtatatgagtgtaggaaactctccgatgatgatggtgctgtatttgtcaccggggattatcaaaaggaataatctggaggttagggagaaggtgtggaaggtgtcggatgtttcaattatatatcaaacttctaccgagaggaaagatgattcggttagcaatgattcaaataagaaaagtctttctgtaatttttgtaaaacctccatttcaattaaagaagaaatttcaaaaagatccattttatgaaattgaaatgaggaagcaattgcaaatgcagcaggatggaataaataatatgactatatttgagtggctgaaaaatagggagaattttaaaaaatatgggcgtaatcctaaatctaagaaaattcaagaagattttagggatagatataggaatgctaaaattgatgagtatcttttattgtatgaagatatggatattaaggctatagaggcaatggttgactcagaattggaaggcttagcagcattacataatcctgatcagatagcaggaggatatgttgatgtggtgactcaaatgggaaataaaagaataaattcgtccattgggtcacaatggggaagtatagaaaaaggtcgttctcttaatattgaaaatgaattgttaaaattaataacagaccctcctcctataacagaagaggagcagaaaaaaataaagatgaatgtaaatttagttgaaaacttagaaattgttaagtagtatgtttgagaaatttttagaaagaagtggaaattctataaaattggaagagtttagtgaggattatatccgacaatacaataatttggtttcggaaaaactaatttctttttggagaatagctggtattggcatttattgtaatggcttgtttagaactattataccgaatgactatcagtatattatagaggaatgttatcctatgtatgattatgaaacagtgactccatttatgataactgtttttggagatatttttgcttatgttaagaatcatgtaattggagattacgtcgtttttattaatataaggtatggaacttttaaaattctatcagaaaatattgacatattgttaaatatagtaattttcaataagagttgtcttgaaaattggtttttattgaatgaatataatacaataaaggaagtgaaggcgatgcctaagatagatgaatgttatggctatgttcctgctttagttgcaggtggaaaggattgtattgataatattcaaatagtaaagattgctccttatattgatacggttattcaattaatgggcgatttaaaaagaattagataatatcaaatcaacacatatgttacagaatgtttttaaggttgatacaatagtttatgtttcaattaatttaaattatgattatagtatatcttatatggaaaatatagcccggaacttcacgaagaagtatccaagctatcttatccataagaaaagcgaagacaagataaaagcctttctgaccgacagggtgaagaccaaagtggaaacctttgtgaatgcagaggcaaagaacgtggcagtaaccgaggtgcgagaaatagcagacctgatagcggaatatgaaggtgcagaaagttcttcatcttttggaccccatcctacggattccccctctttaggaaacaccggagtggagcttgccatgagtgtagacacaggcgcatcggacatccgtcctgtcaatgtagccaaacccacgggggcaacaggaaaacccaagataatgaaaagaagtgtcatccgtgtaaccatggaactggaagtgcagatggaaaccaaacaatacttgcaattcctgcaacagattccagacctgttcagcctgcatgaattccccaatttgagatgccgcgtgatatgcaaccagaaaaaggcaacaatcaacgaagagccagcaccggttgaagtgaaggttttggatgacagaaaataccagcggtggtttgttgcctttacactgttgatggtatgctgcatgggcggaatcatagccctgttcttttccattccgaacctgtacaaacaggacatccacttcctgcggaacgatacgattcatcaggagttttccatttccaacagccgtattgacttgaaggatgtaagcctgacgaatcatggcgggaaagacacacttgtcatcaaggataaaaagataatcatagccaaataaaaagcaatggaaaattcgattcagatacaagggataagaaacatgctatcccatagcggatgcccggaagacctgctggaaagttacctgcaattcctacaaaccgaaggccaacaggtgcagattgtcagaggagaagtctttatgatgtttgaaaaggaagcgcaataccgcaagagaaggaatgaaaagatgaaaggaaccgtaactttctgcaaaaacacgaagaacgatacaggggaatacaatacaggagtgttcatcggaatggaatttatccaatgctgcttcaaccatgggattcctgcacgggtgctgaatgtgcggagagtacatggggaagtgacggagattgtcgtggagttcgggaagtagatgaaaggaatacccctattgcagagctccgacctaataatatgtgggggaaattgatgggaaaatccccccacacacttcatcttgatatttaatgagaggaaggattactccttcttggatgttttttcattatccagccccaatcgcttgcataactccggatcgtttttgatacggcccatctcttcgttgatgatggcctgcgcgtccgacttgatctggtcgtagttacgctgaatctgctgcatcatgatgtcattaccgtccttgtccttgaattcgttgatgaaagggattttcctgtaggccttttcttccgcactgaccgccgcatggtctacaacaatttcggcatggaatattttctgttctatcttctcgccaaaattatccgccacagccccgacaaacgtaccttgcgacagattggcaatcttggatgccgggataagcgagtcaagctgcgtgttgatggaagtggaaacatcctgacggttgatggaaacggactgacgctgctggagcaccttgccgaagcgttcagaaagtgtctttgcggtttctccgaccacctgcccgctgaatatatttcctaccgtgttctgaataaccttggactccttttcaccataatcgcgggtcagctggctgaaatcctgaaaacccaaaagtacgcccaccttgttgcttcgtgccgttgcaatcagattgtcaagcccccggaaataaatggtgggaagctcatcgatgattacggcacatttgagctgtcttttcttgttgataagtttgacaatacgggaattatatagtccgagtgcagccgaatagatgttctgcctgtccggattgttgccgacacaaagtaatttgggttctttcggattgttgatatccaacgaaaaatcatttcctgtcatcacccagtatagttgtggggaaatcatacgcgtaagggggatttttgccgaagcaatctggccctggagctgatcctgcgcccctcctttccatgcatccatgaaaggagaaaggtagttttccaactccggataggaagtcaggacggtgaacaggtccgaataaggcttgttcagtaattccaccgcatgcgggaacgtacaataaatcccgttcttgtaaatcttcaaataccagattattgcagcaagcagaatgatgggggattctacaaaaaagtcaccctgcttttcaatccaggtgcgattgaggttgagcattatcgtatagctcgcctcgtacgcatcggaaatgtccgtcataaattccggattgataggattgcatcggtgagacctgcgcggatcgtcgaaatttatgacatagaaccggggcttgacctcgtacttgtccatattcttcaacaaagaattataggctatggtggacaggtcatcaaacttgtaatcgtagatgtaaatcgcaaagcccttggctataagctggcgtatgtaactgttgactatcgcataggacttgccgctacctggtgtcccgataaccatgcaggcacggaaaatattgacaatattgacaaatccgttattccagcgttttttataatagaatctcgttgggagatttaccgaatactcattctccatcagtcgggtttcctgcatgaaactctcattttccatattgaacacatcttccatgaggttgtgcctgtaaaggcggctcatccatagccccgacatcagcagggcgagatagcctgccgtaagagtaaaaatatagaatgcggtatttgccgcgtgcggcaatggcagctcaagcaaccaccagtttagaaagaacagtgcgcatcctgccaccagcgccgcataaattttaggccaggttatcttttcacctttgactccgtgcgtacccagacaggaaacggccagcagaagcactgccaacagtttgctccagagaatgcagttgaaaatcccggtcgtattattgaaattcaccagaatcctgtccatcaccgcaaggttcaagtgccacgtggtgatactcggataacaatacacatagacgtgtaccaccaaaagaaaaatactcacggccctgccaaattccatgatcttggcaagcgccctcaaatcgtcttcctgctgcataagaattgtatataaatgggttgatacttgttttgtctaaatgccacgtttgcgtccggtcttcttctttttcttcatgcggcgtgcaaaggcttcctcctcatagtcacgcgggttggtttccatcgaaagtatgcccgccgccagttcgagcgtgctgccggattcgtggcggtgatgctgccgaagttctgtagcggaatgtccgccccgttccttttcgggtatgttttccaaccatttgaaatagtcgttgaacacattggcggaaaactccttgcccatgcgtgaaccgttgaacacttcccgtcggtcgtggtcaatgaaggtgacaccgtagatacgtccccgctcattctcacggaacaccacatcgatatttttttgccccagcagttccacaaaccgtttccgtgaatccgcctgccgcaaggcacgggcgatgtccgcctgtatggagggtgcccattttccctctttgagagctttcagattcatcaacatccgcttttccaacagttcattcccgaagcgttttccgaaacgtgaactcttgaacggcggactgaccaccttgccggtatcatccgtggcagaatagacaatgccggtgtagggtatgccggtgtactcccccctgacctgtttcgcctcgatgttgagtgtggaaagcagtgcgctgtattccccgaaagtctggaaacggtagctttccagtacggctttaagggtgttgcctacctgatggcggacatcccccaaggaagcatccaccttttttagttccgctttcggattccgcctttccgtgtccgctccgttgcgcaagccgaaatccgtttccagttcccgacaggcggtcatggaacggcggtgctcgtaggcgtcactgatcttttttccctgtccgtctacacagacactgacgatatgaatgtgggcattatgggtatcggcatgtttgtaggctatgtacggctgattcccatagcccattttctgcatataccgttccgccaactctaccaattgcccatcagtcagctggtcttccggtgccggagaaagggagatatgcaggacgggcttctccgtattgcggtttgccagcaggtagttctcaaaagagagcaatgccagacgtatgtcctcactgggcaatcccaatctgtcggaaatcatgcggttgcccgaaagaatctcggcggtacctgccgttaccttgtcgtagttataggcaagtgctccgtaaaggcttgttccgtgacttatttttgcaaccatttccgctcgtattcctgggttagcaccatgacttttttacatacaagcatcagttcgatgctcagtttctccaacctgtagagcaatgccatcgcacgtttttccccgaaattgttcttcaaggtccggacaacctgattgtagttgtttccgacggcctgaaactgcctgtggaattcggtcagtttgatgtagtagtccattgtcgccttgtcgattttcacaactttaatctgtcccgaaaagatggatttcttgatgaacagcgtgcggtccccggctcccgaatccgccagcaatttttcaaatcttgtgttctcctcggcgttcaggcggaagctgtacttgcggtccgccggatcactcttgggctttctgcccgtccttgtccctgttgttttctccatgcacatgagatttttggtttgtacttttttctcttccggaatccgcgactttggagcggattcccccggcttttagccgggctagttgtttttgtcggacaaaagactttttgtcggacgaaaacacaacttgctctgttcgcttgaacagagaaccctccttcgtcggattgctgcgcgacgttcacggaacgctgtgatccgacgaagtcagttcttttccatcgtctgattccgattttgcaaaattagacagtgataaccgattggtaaacagcgtttgatatgacatttgatgacatctgatgacatctgatgtcaggtaggggaaatgttggtggaagtttcaaaaatagccgctacttttggcacagtgcatgagggcatacattgaaacattgtcctgtaaggggtattgcttgcctgccacaggtggtgcatggtgtgaatgcggcatcatccatatatgtgcaatgccatatatgctgcacgacaatcctgcatgacggaatacattgcatccgtgcaatgcagtatgggatacattgaaccccatattgcatgaatgcaatgcaccttatatggcaatgcccatcggcaaccggtattacactggtgcaatatggtatgcaatgtattcatgcaaaccggcaaacaatgcgtcattgccgtataccaacggatgcattgccgtgtgatgaaacgaaaaaatccggacagatatgaaacaaattatacactctaaattcaagcctatgaagaaagaacctttatttgtcgctttgagcaaccagaaaggcggtgtgggaaaatccacgttcacggtattgctcgccagttacttccattacctgaaggggtataacgtactggtggtggattgtgattatccacagcacagcatcagtaccatgcggaactgggaagtgggaaacattgagaagaacgtgcatctgcaaaaccagctggtggaacagttcggagcaagcggtaggaaagcctacagcatcctgaactccactccggaagaagcccgggaaacggccggacgctttcttgaaaaatcggagctggattatgatcttgtcctttttgaccttccgggtaccgtaaatgtgcccggtgtattccagtccgtaatcaatatggattatgtattcacccccatcacgcaggaaagaatggcaatgcggagcagcatgtcttttgtccttgccatccgggaatacatgcaccggcataaggatgtacccttgcgtggtatccatatgttttggaaccggatggacaaacgtgtttccaaagacctgtataacggctatactgaaattttccgttcgctgaaattgccggtactggaaaccgtcattcccagtgcagaacgttacaaaaaagactccggaatgaaagggcctctgttccgcagcactttgttccctccatcttcctccgcaatgaaaggaagcagtctggacctgctggcagcggaaatagaaaccatactgaaacttcaataaaaacaattatgactaccaaaagaagaacggattaccaagtggatgaggaggcattgaaacgcatgatggcaggagatgtgaccgctttggaaagaacggttcctccggaagaggagccggaaacaaaaagtcaggctggaccttgttcggagaaacaggagaagaaaagcggttcttccagacagcaaataaaaaaagcaccggatggagcggctgattcagatgaataccggagccggtttctgaaagtgaaactgtcgggagcaagaaggcagacctatattaacgatacattgtacagaactgttgccaaagtattgccggtcattgcaccggaaatgtctgtccccatgtttttaggaagtgtactgtcagaccatctggaaaggtatcagcatatcatcaatgaaatatataatcaagaagcaactcaaaagccaatagaatggaagaaatagtttatttatcaatacggttcggctgtaccgcttatctgttatataaggtatggaaacaaaaagagagaataggtaaaatctgtgatctgctttgtactcctcgcaatcggccacaagcagaaaaagacaacggtgaaccgggaaatgcacaggatgtgatgggagctacccgctttgtctatctggacgagaatgccgggaagaccgtcgccccttacatgagccagcaactggaaaccggaagtgattttatcggagcggataaggatattccggaagatgaagtggaatgcaaactgcctttggaggagatgagaatgctgaaagatgaacaggaggaactggacagccgctctcccgaaacggaagccattgctccgatggttactcctgctgacctgctcaatgtaggcgacgtgctgcttaacctgaatggcgccggctcggacgagaacaaatcatacagggcggccatgacactgcattccatccgggaaacggacatgtttgaactgttctcctcccaggtggagaacaagaagctgattgaggaactgatggggaagtatgtggataaggaagggaatgcgttgcctttgaaaagagagaggaaagaaagcaaacatgttactgactggaggaatctagtctgaaaaggcaatatttatcatgttcggaaaatcctgtatgcgttaaagtatatgggattttttatatgatgtacccatttaacgaaaacatgcaacaggcattcttccaaagtggaggaaacctgttttttctttttcatccgttgtacggcaaagacatctgatgacatttgatgacatctgatgacacctctgaatcatagcgtattatccccatttatctttgttgtcgaattcaaatttatgtcttacccaaacgattcgacaatgaaaagaagaatccttttttctgtgatgtgtgcggtcatcgccgcaaacacctttgcgcagggccagggccttgcgggtatcaacgaggcaaccagcctcatgacctcgtatttcgatcccgccaccaaactatgctatgccatcggtgcggtgcttggtctggtaggcggtatcaagacctatggcaaattttccagcggagatcctgacacttcgaaaaccgccgccagctggttctttgcctgtatctttctgatcgtagccgccaccatcttacgttccttcttcctctaaagcctatggaatatccggtaaacaaaggtgccggcaaccccgtcgagttcaaaggactcaagtcgcaatacctgttcgtctttgccggagggcttgcgatggtgctccttatggtagtctttctttacctgacgggggtggaccaatggatatgcttatccttcggaatcctgtccggcagcctgttggtgtgggtgatattccgtttgaatgcccgttacggtgaacacgggctgatgaagctgctggctgaaaaacgacatccacgctatctgattcaccgcaagagagttttcagattattcacaagaagaaaaaaacaacaatcatgagaaatgtattaaaggcggaaacgctggaacgcagattccccctgctatcggtagaaaacggctgtatcgtgagcaaggatgcagacctgaccgtggctttcgaagtggaactgcccgaactgtacacggtaacggcagacgagtatgaggccatgcactcctcctggatcaaagccatgaaggtattgccggaacatagtgtcgtctgcaaacaggactggttcgtcaaggaaacctaccgtccgaagaccgatgacggagaacagagcttcttgacacgcagctatgagctgcatttcaatgaaagaccttacctgaatcacaaatgctacctgttcctgacgaagacaacccgcgaacgcagccgtcggaagagtgacttcaataccctttgccggggattcctgttgcccaaagagataaccgacaaggatgctgccgcccgctttcttgaggcggtggaacagttcgagcgtattatgaatgattccggacatataaggcttcgccgtctggaaacagacgaaatcaccggtacgaaggaacgtcccggactggtggaaaaatacttttccctctcgctgaaggatgagaccgccgtattgcaggacatctgcctcaagcccggcaggatgcgcatcggtgacaaacgcctctgcctgcataccctttccgatacggaagacctgcccggcagactttccacggacatgcgctacgagaggatgtccacggaccgcagcgactgccgcctctcctttgccgcacccgtaggactgctgctgtcatgcaaccacatatattcgcaatacgtgttcatcgacgacgcacaggaaatcctgcagatgatggagaaaaactcgcgcaatatgctctcgttgtcaaaatacagccggagcaatgccattaaccaggagtggacggagatgtatcttgatgaggcacataccaaaggagtgcttcccgtcagatgccactgcaacgtcatcgcctgggcggaggatgcggaagagttccgccgcatcaggaacgacacgggcagccagctggccatgatggaatgcacgccaaggtataacaccattgacacaccggtcatctattgggcgggaatccccggaaatgcaggcgactttccatctgaagaatccttttataccttcctggaacaggccgtatgcctctttgccggagagaccaattacaggagctcgcccagtccgttcggcatccggctggcagaccgccagaacgggataccggtgcatgtggatatttccgacctgcccatgaagcgaggaatcatcaccaacagaaataagttcattcttgggccttcgggcagcggaaaatcctttttcaccaaccaccttgtccgccaatactacgaacagggagcgcatatcctgctggtggacactggaaacagctaccaggggctgtgcaggatgatccatgaccgtaccaacgggaaggacgggatttacatcacgtatgaagaggacaatccgatatccttcaacccgttctacaccgaatccggaaaattcgatgtggagaagcgtgacagtatcaacacgctgatactgaccttgtggaaacgggaggacgagtcgccgaaacgttcggaggaggtcgctctttccggagcagtgaacgcctatatccgaaagatttcggagaaccggaacatcagaccggacttcaacggtttctatgagtttgtcgccgatgactacagaagaatgattgaagagaaaaaggtgcgtgagaaggattttgacattgacggttttttgaacgttctggaaccgttctaccggggcggagattatgacttcctgctgaactccgacaaggaactggacctgacaggcaaacggttcatcgtattcgaactggacaatatcagcagcaacaaagtgcttcttccagtggtgacactgatcattatggaaactttcatcgccaagatgcgcaggctcaaaggtatccgtaagatgatattgatagaggaatgctggaaagccctgatgtccgccaatatgagtgaatacatcaagtacctttttaagaccgtcagaaaatatttcggcgaggctgtggtggtgacacaggaggtggacgacatcatcagctccccgattgtgaaagaggccatcatcaacaactctgactgcaagatcctgcttgaccagcggaaatacatgaacaagttcgagcacatccagcggctgctcggtctgaccgagaaagagaaagggcagattctttccatcaaccaggcgaaccatcccgggcgcttctaccgggaagtatggatagggcttggaggaacctgctcggcagtatatgccacggaagtgagcgaggaagaatacttcacgttcacgaccgaggagtcggagaaactggaagtacaacggattgccggaggaccggagggcagtctggaaggagccatccgccgtctggcggagaaaaagcgagaggaacagaaacaggtatcaaacccgaaatgaaaacgattatgagaaacagaccccttatgaggctggcggtatgtctgataagcatggccgccatgatattacagagctgttcggaaagcggtatcgaccgcgacaagatctgcggaacgtggaccagcgtggaaggcagacctgacgtgctggtatacaaggaaggagaatgctataaggtgacggtgttttcccgtagcgggagaacccgaaggctgaagccgcagacttacctgctggtggaagaaaacggaaacctgtttgtcaatacgggctaccgtgtcgatgtgtcctacaatgaggcagtcgacgtgctgacattctcaccgggcggagactatgtaaggaaggaggaacgggcatgaaggcaagaacgcttctgatcggaacggcatttgtactgggcgttaccggagcacgcgcccaatgggtggtgacagatcccggcaatctggcccaaagcatcataaacatgtcggacaatatcgcccatacctcaaagacggcagtcaatacggcagaaagctttgccgagacagtaaagatctatgagcaggccaagaaatattacgaccagctgaaatcggtcaacaacctgatacaggatgcccgcaaggtgcgtgacatcatcctgatggtgggcgacgtgtccgacatctatgtaaccaacttcggcaagatgatgaacgatgaaaacttctcaccgcgcgaactggacgccatcgccttcggttacacccgcctgctggaagagagcaacggcgtgttgcaggatctgaaacaggttatcaatgtcagtaccctgtccatgaccgacaaggaccgtatggacgtggtggacaactgctattacgagatgcgccgttaccgcaaccttgtgagctattatacgaacaagaacatagccgtaagctacctcagggccagaaagaagaacgacctggaacgtgtgatgcggctctatgggaatgaaacctccaaatactggtagccatgatgccgttgtcgatagattttgccaacctgcacaccatactggcaaccctgtatgacgagatgcttcccctttgcgaggacatgatggacgtgggcaagggacttgccggactgggtgcgttgttctacgttgccgtccgtgtatggcagtcgatggcacgtgccgaaccgatagatgtttatcccctgctgcgtccctttgccataggcatctgcatcctgctctttcccacgctggtgctcggcacgctgaacaatattctcagtcccatcgtgcagggcacacacaagatgctcgaaggacagacgatggatatggaacagtaccggatccaaaaggaggaactggaaaaggaggccatgctccgcaatcccgaaacagcatatctggtaagtgacgaggagtttgaccgtcagctggatgaactgggctggtcaaccatagataccgcctcccggctgggcatgtatgtggaagtcgggatgtataatctggaaaagaaaatccgggatgcattccgcagcctgctggagctgatattcgcagcggcatcgctgctgatagacaccgtgaggacttttttcctggtcgtactctcgatactgggaccggtagcgttcgccttcagtgtatgggacggattccagtccacgctcggacagtggttcacgagatatatttccgtttacctgtggcttccggtcagcgacctgttcagcaccctgcttgccaagcttcaggtactgatgcttcagaatgacattcaggaactgcagaacaatccggactactcgatagacaactcgaacagtgtctacatcatctttatgctgatcgggattatcggatacttcaccgtgcctacggtagcaggctggatagtgcaggcaggcggtgccggaaacttcagccgtaacctgaaccgtacagccaccaagacaggggggcttgcagccggagcaggcggtgccgtattggggaatatcggaggcaggctgaggggcaaataaaccctgcggagcctccttcccatgagtcgggcaacccaagatgacgggtccggtgacttgtcggaacgggatgtcccgtcataccggaaatatttattcattcaaaccagacatcaaaaaaatggaattcaagtcattgacaaacattgagagcagcttcaagcgcatccgcctgctgctggcggtctttgcctgctgctgtgcgctcgttaccggatatgcgctgtggagctcataccgctttgccgagaagcaacgcgagaaaatctatgtgcttgacgggggcaaatcgctgatgatggccctttcgcaggacctctcacagaacaggcctgccgaggcgcgggaacatgtaaggcgctttcacgaactgtttttctcgctctcaccccagaaggatgccatcgagcacaatatcaaccgtgccctgcaactggcagacaagagtgcctatcactactatgtggattttgccgaaagagggtattacaaccgcctgatttcaggcaacatcaaccaggtggtgcatgtggacagcgtggtgtgcgactttgccgcctacccttacaaggtgcggacatacgcccggcagctgattatccgtgaaagcaacgtgaccgagcgcagcctcgtaacttcctgctcgcttcaaaacacaggacgttcggatgacaatcccaacggattcattatcgagcagtttaccgtgctggagaataaggacataagaagtgcggaacgatgaggggaaaacgcggattcttcggccatgcggacagccgggtacggctgttctgccggcggctgacaggaaagcagcgcatccttctggcaggcacggtctcgttcctgcttgctgcctcctgtctgtactcgattctctcctgtgtatcccgtttcggggagccgggccaaagaccggcaatgggacatatccgttccgtcgtgttccggtcggaaagaacaagaaacattcattcaaacatccataaacatgaaaatggactttcagaaaatcagggaacggctcggagtgtcaaatgacaagccgctgactcccgaagagaagcgccggcgcgcaaagtatattgtctatccgtttctctgcctgctgtgcatggggttcctcctgctggtattcagtccgtcggaaaaggagaaggcggaaatggaaaaaggcaagggtttcaacgtggagatgccttcaccggaagattcggaaatggagggcaacaaggtaagcgcctatgagcaggaagcactggcaaaaaaggaaaaatggcgcaggggaaccttccaggagatgtccgaactgctcaacaagggcggtcaggatactgccggtcttactgcaggaaaagcaaacatggaacttccgccggaaccggaaaaggggaaagcccccggctccatccgttcctctgcagaagcctaccggaatatgaaccgttcgctgggcactgtatatacccggaatgaaaatcagccagatgccgatctgctccgccgtattgaggatctggaaaaagaaaggaagccggcggaagaacaggcggaaggccagaccctggaagaaaagatggctctgctggaaaagtcctacgagctggctgcccgctacaacgggaaagagcctgatgcttcctctacggccaatgccccaaacagccggaaagaacggacggctgtccggcctgtaaaacgggtacagaaccggatggtgtcatcactcgcccagcctgcaggcaatgaagacattgcttccggatatgcaggcgagagaaataccggcttccacaccccggtaggcaaaatgccatcttccggcaggaacaccatcgccgcctgtgtgcatggcacgcagaccgtatctgacggacaggcactgcgtatccgcctgcttgagccgatggcagtggacgatctccttatccccaaaggtacggtactggtcggcggtacacgtgtcgagggggaacggatgggaatcctgatcgagacagtggagtacaggggcacgctgtttccggtggaactcgaagtgtatgacgctgacgggcagcagggaatccttgtaccgaactcgatggagtatgatgccgcacgtgagattgccgccggcatgggcacctctataggaagcagcatcaatatctcaacggatgccggagcgcagattgcctcggatgtgggcaagggggtgatacagggtatgtcacaatatgtgggcaagaagatgcgcacggtgaaaatcaccctgaaggccggacaccggctgttgctgcattctcctgaaaaatgaaggaggaaaggaaatcaaccatttattcaccaatcaaccaagaaacacacatgaagaagattctgatgatgcttgccctgattgcgggcacagtggctgcatacgcgcagcagagcagcggggattattatgaaggactgagccgcaagatcggattcagccggatgattcccccacacggtctggaaatcacatatgacaagaccgtacatattatttttccctctcccgtgagatatgtggacctgggttcgcccaatctgatagcgggcaaggcggacggtgcggaaaatgtgatccgtgtgaaggcaacccggaaacatttccggagtgagacaaacatgagcgtaattaccgaagacggcaacttctatacattcaacgtcaagtatgccgacgagcctttgctgctgaatgtggaaatgtgcgacttcatccatgacggagaggccgtgaaccgtccgaacaatgcgatggaaatctacttgcaggaactcgccggggagtctccccgtctggtacggctgatcatgaaatccgtgtatgaacagaacaaacgcaaggtcaagcacatcggctgcaaacggttcggagtgcaatatctgcttaaaggactttatgcgcacggcgaactgatctatttccataccgaagtgaagaacgccacgaacgtgcctttcgacgtggacttcgtgaccttcaagatcgtggacaagaaaatcatgaaacgtaccgccatgcaggaacaggtcatctatccgcttcgtgccttcaactatgtgacccgtgtggacgggaagaagaacgagcggacggtgtttgccctgcccaagttcaccattcccgacgacaagaagctgatagtggaaatgtatgagaagcaaggcggccggcatcagtcctttgatgtagagaatgaggacctggtacgcgcagaaaccgtcaatgaactgaaagtcagatgaacgccatgaaaagaaactccctctttattaccctcctgcttgccctctttacggggcaggcagaagcccaacgccgcctgccgggaatgaaagccgtccgcttcaccactgaaatggccgacggattttacagccgggcaaaccgtcacgatgcaggctatgccttctcgctggctgtatccacctgtaccgggaacagaaaccagtggatgtttggcggtgagatgctgaaacgtaacatcccttaccggagtacgcatatacccttgtcgcaatatacgggggaaggcggttattaccatacgttcttttccacccccggcaagtccttcttcctgaacctcggcgcttccgccctgttgggctatgagaccgtgaacgaaggagaccggctgctggatgacggagccgttttgcagcaatgcgagtctttcatctatggcggcgcggtaacgctggaagcggaaggatacctgtccgacagggttgtcctgctggtgcgtctgcgtgagcgtttcgtgtggggcagcgcctcgggaatctgccacttccagtatggaatcggagtaaaatacattttctaaccttaaaagaatacatacccatgaaaagaaaaatccttgattttatgctgacagcctgctgtatggcattctcctttcttggtcttgtcgcttgtgacaatgagctggatatcaaacaggaatacccgtttgcggtagaagccatgccggtagcggatgagattaccgatggggagactgtggaaatccggctggaaatcaagccggaagggaactttaccggaaccgtctatacgctaaggtatttccagccggatggtaagggcagtctgaagatggaggacggaacggtactgaagcccaatgaccgttatctgctgaacgaatggaaattccgtctttactatacttcgcaaagcggcaaggaatcccagaccatagacctctatcttgaagataattgggggaatctgcaacaattgacatatgattttaatggaaaggatacggatgaagaaaataacaaggaggctgcatgaaaagaataccggctgttatgatctttctgttacttgtcttgtacggcaaggcggaaaatcccccgtctgacaaagataaggcggtagcctgcatcaagcggtgggaaggctggcaccgggggaaaatgccttacatcggttacggacaccgcctgcttccccacgagacgctgaccgagaacctgagtgaggcacaggcggactcacttttgagatgcgaccttgaacggtgtttgaaggtattccgaaaatatgggaaagattcgctccttttaagtctgttaggctttaatgtaggctgttaccgtctgatcggcaacggcaagatacctaaaagcaaactgattcagaaactggacagcggcaaccgggatatttacaaggaatatgtatcgttccgctgttatcgggggaaagtcattccaagcatagagagaagaagaaaagaggagtttgaactgttctatataccgtagattgcttgttgataaaggtttggttgttacgagacgaccgaatcttttttatttgtccggtatgaacatatccctaacaggtgttgtattttaatgtaaccgaaagacataaaatgtgttattgagcatatggtgcataaaaaatgctctttgaacattgtctttcttgattttttgctaagtttgagatgtaatgtcaaatgcataaaacaagtcgtcatgaattcagaaataatattggaaataaatggctacaaatgcaatctactaaagtataaatactgtttttcccgtaatatagaccgtaaaggaagacctgtaacaggaatgttaggaggaaacatatatatagaaatggaatctaatggcagcaattgtattttggatatgatgcttgttgatacggatcggcagcgttccgctttcttttctcatgcagaaccttttccggtttgggggaagatactgcatagcatagacgatatgatgtttcgtgaacttttacttcgtatcgttatatcattgaaaagtttacggatacaaaaaacgcctaagctatcacctaattgtggcaatttgcgatgaaacctttctgaaagtaagtgtaaccgcaaagaatgcttttcttcgtctttatactcgaattgcttttcaaacataatctgattgttctgttctcctttgacaatgatagtggcttccttaccattgtgggcttgtacttcaattgaaattattgttctgttcatacttacaaattttctttattctatatataaaactttgggaaagatatatgagtgacattttgtcagaatagagatataggcatacctcttgtacatataaaagtgtcccctaatattcgtagtatcaggaggaaaaggattcgtttaacactgtaaaattgaacaaaatatggtataaatattggattgaatttaccccatagggaataagacaaaagcttatttggttagagaagtgattggtaataaacttgctcttaccgcacccgattatactcgtttatacttgggtatgtctgaagttgaaaagataacggactgtaatgtgttatttaaactgggaaaaatagatttttaaatattggaatatgaaagaagaaagatttattgaagaagattttgaaggttttctggaggacttgataaagtctggtcgtttagatgacaaagaagctggtatagctaaaaggatgttggacaaaggatatgacaatttatctgataaacaaaagtatgtctttaataagatgattaggaataacagcgttgaggaatgtcaaagatgtgcttgtgatattccttggtctgaaatgcttgaagctcttgataatggcggttattgtaactactgtcagcatatgatggagaaactggaaaacgagtaagaaaataacgggaatagctatcaaggttattcccgttaatgtttaatcagttattataaatcagacaagcctatttagggtattgtcgtaaatactcacctcatataaataataaataaggacatttttcccaaccatattatgattatatgaacgaaaaccataaagacacattacatattgaaagtattcagcaactaaaaaaacaagaatcctgatttagttgatgcttttctggaaggagatagtcttttatttagagtgcactataatcaaaatttaattccatatacttaccctgttcaagttaaataacgagcaaatagctgcttggataaaatgacttgaatagtcaaattagatacatttacaaagcgggcagagtcataaaatgggaaagggctaaaaacagaaacgccacaggtatgatgtgatatacatcaccttgtgacgtttctgtttttttaagatgtatttgtctgctattcttacttttgaagcaagtattcccctattgaaagataccggtctttgattgtggcattttcattgaatccattcagacaatggagcaaggctttctccaaagtggtgtatctgcggttaaaacattgcggattgtccaggcaataggcattcaaggcatatctgtatggggcatattcaggattatcctcttttgtgattttcacatgccaaggaaagtgtatccgcagagtgaatgaccgtgtttccccttttgtaatccgttcctcttcctccagcatttttttcacgagggacctgtccagcaacggatatccatattccctgtaatgtttgatatggcagcaatactccgttgcgtattgcttcaattcttccggtcttataccatagtgcttcccatagaaaagcagcacttccctgcctgttacgataacgggctttccgtccgcttcatgtttaaatacctgccgttccatcttttccctgtctgtcagcaaggcaaaaccgaaacattccgtaagggtgaaactttccctgccgggaacggacagcccaataaggctttccaatgtgtggcagtaaaagaaaataccgtcatcggccataccggtgtccggtgaaagcataattcttacatccttgacctgaccgctgtccctttggacaatccggcaatttgcgtaatgtggctcacaagcattctctttcttgaacctgtggtatttctccaaaatttcgttccggatttcctccttgtcggtcagggcaactcccaatccgcagttttcgcaccacccgtaataaaaagcttcgtccgtgaagtggtcgaactcttttgtgttggggtttaccattgcctcacacctgacattggccgatccgcatctgctgcacactatattattttccattgttcttctgctttacgggcgactcacggccgcccttgtcatacaattcggttgttattctcttaatttatctttacccggttcatcagctgtcccgaaatttcatgcagttcccggcagcgttctggctgctgttcccttgcaaaggcggtgattccctgtgtcagtttccatagcgtggccccgcctgtaactccgtcgtcaggattgttgttcatcagcagtttctcgacctcacgtccctcgtttttcaacaaggctcctttctgcaccagattcttcagttccttgtcgaaatccacgtctatctccgatgctccttgaatttcgatggccttctgcatgatggtgtctttgctgtacagtcctttggtcaggtcggaaacagccgatacggtggtctgcgtgtccagttcgtaggtcttttgggagagggacagggattccggcagtcggcctccaaggtgtatctgccgcatgacggactccctgaccatcccgttcaggcacgccccgttgagcaggaacgaccgcatatcgaccgatccgttgccatagtcggatgtggagaagcgtgctcctgcgaagatgatgaccgttccgttcttacgggtgggtatctctatcggagtgggcaggattgtttcacaccatactttcgtgtcgttcatataggcatcggacacgaccgctccctgtcctcccgcctcacggatgaaagcggtcagtatatccaccgagttcagccgacggtaggagtccgacaatacgccccggacttccattcctaccgcccgtatcagtacccgtgtacgctcggtccatcccgaatgctcgttcaggatggtggcgcacaactgtttctgccaaacatccccggcggaaagctcgcgcaggtatttggcgggaatgcccatcttctccgaaatctggcttatggcgttgccgtgcaggttgaagttcccttcgggcattgccatctgtacccttccttccgctttgaaagagataacggggcgttccttgctacgttggcttaccccgatgggagcgatgaaatcctgcgcgatccgtccctcactgagcagacggttaatggtgtccatgacaccaccttgcctgccttctatcatccgctgtaccttgttaatgactacctggttgaggccctgctgcttctgtaccgatgcagctgccggcattactgttgtttccataatactatgtttttaatgttgatgaatcagaatttattcttagagcttgtcttggttgttttagcatgtcccatgtatttttcttctgacaaacggatataatcctcttcgctatatccggtcagcccgaacagttcataatatccggggaaagtttttttccccgcttccggtatatgcatgctggttcccttgtggcagcagatgatatgccggacaaagcggtaacacttgcaaagatcagccacgacggtatattcgttgtccgtatgaggttcgtaatatccacaggaaagattgatacaggatacttccagaccgttccttttcaaagccgccacatctgtattcagtccctgtgccggcttgtagccgtacttccggacatctatagctgaaatgaactcgttggagcagagcttcatcccattgatttgtgttaccatatccccgttccctttccggtcacactgaatcacgaaacggcaatcggaaaagaaggacatatcggcatggctgctgcctatgcatcccacctcctcctgtacgaagaaggcacatttcaccgtcttgcaatcctccaggcatttcaggcagatccagatgccgttcttgtcatccgcaccgattccggtcatccgtttacgcttgtgatcatagccgacaatcatcgagtccgccacaagatgggctgcataagagcctgtcttgcgccggtgtacctcatccatgtgcgccacgacacaggggtagctttcccggttgcctttgaccgcatagatgtttccgtacctgtcttgccggaaaggaatctccatccttttgagttcctctatgatgaatttagccatcttcccctctctgccagagggggaagaaatgccgtaaagagccattagtttttccatgataatgatattttaggaaatgaacaatttttcgatttgcaggtatcgtctgaattccggtacgggacgccctttacgaaagagaaaagacggatatttctttcctttatattccactgataatcctttcaggactttcccgaatacggtagatacatagtacatatcctgacagttcttgcagaatgccgcatccgggaagatatgtatcttcccgcatttgggacatacatattttttcctgtttgcacacccttccgtgctccggcaggtggctatgctcgtgtcgccctccgtatttctcagttccaggttaccgtccgtcagatgaaggctgtagaacgtgtcgaggtaaggcacccctttcttgtgccacctgcaggcgggcactttcaccgtcaaagagacctgtatattatctccggccgcccattcctgcccctcaatgggattcagtacggtgaaatccgtcgtatgtgtataatcgttgtatctgcgtcgcaacaggatgcctgcctcctgcgcctgcttgcggatcagttcgacgacgaatgcgtgtgaggaatagatacgatccagcagggaggcggcaatcggtgtgtttattgatttccacaatgttatctcgttccatacaatggcccgtccgaccacattgctgctgtcatcccttgccacgagtattttggctcctgcgaaattggcatagaaatccgctgcattacgggccttgtcttcatatctcatacaggagttgtgcaggctggattcgctaccgtcagatatgggactatagttgctttccagataagcctccataaaatcgttcatactgtcatgcagtctgattgtgaccttgctgtccagtgagatggcgctgcagaaatagttgatttcatcgggctggtacggtcccagatttttgaacagctcgataaacgtggacggttccagatctgtccggttctccggaaaccagggtgcctgcggattgttccggtccgggaaattgggatggcccaagtctttgttgcatgccgtgaacacgatccggattttcttgaacgtgccggcttccgtccgtttgcgtttggtggagaaaaaattgtaggacccccgtatgacttcttccaccggtacattcttttttacttccgaaaggatatctttggctatcacacttccgttttccgccgcatgggtcaggcgggatttcaattcgttgctaacattcagtttcataatcattcggtttattgtttataaattctgttgtttatatggcaattgtttcttgccaggctgcatttggcgcaatttctctttccgctttctgagcaggtcaacggacatgttcctgcttgtccgatattcctcctcactcatccggcgaatggagggaatgcccgtccgggtcagcgtatggtttaccatccagccgtccatgaagttttcggggcagaggctgtcatggtggatgacctcacctatgcagccatgtacgagcatgttgcaaacggtcatcaggcaacaggtacggctgacatcctctgcaaccagataattacccaggtggcgtacatgatatgccagcagcagccttccgcttccgcatgtcgggtcacagatacgttttcctgtcgctgtctcccccgaatcggtacataagaccatcaggtcgcagatatccggcggagtgaagaactgtccgttcacctgccgaccgcttttggaggatattgccatgaagaggtcaccgaacgcatcaaaccatccgccggattgcaattcccgctgcatgagccgtatccatccggtaagcatttccataaaatgcctgttctgctgccgtttgtatttccagtccataaggggcggtgcgccgggagagaacccgtgaatgacatagcgcaggaaatcgttgaaaacggatatcggatcgtagccgttcgaataggcgaaatcacagaccattttctcaagcggacgtatcgcctgcggtgtgttgtatggtaccatattactctgattttttatagattgttactatatgtcttttatggtcagtctgtatcctgacgggagaaatgccaaggaaagagagatgggtgtccgctttcagcatgttccattcccatgcgggaagttccttccattccatacggtatgcccagagtatgaacagaccgggacggaatccgttgaaaagctttccgtgcagaatcccgaccagccgttccagttcttcccgcgagtaaagggtgaatgcctcattccgatagacaaaggcatcagccggttcaatatccggctgacactcgatgaggtatctcttccattcttttgtggtgtactttccgtacagaggatcgggttccgtgtatttccatgccctgacgaatgtgtggaagaggacggcaccgttcctgtgccttccggtatgcccccacatccggaactgtttgctgcgtatgccatcgggaatcagcaattccggaccggttgtaacccaagggcctccttcggtattgtaaccggtacacttttcattttcatggcaaaaaggtgtctgtgggagaaggcagatatgaacttcccggtcatcgcccctttcaatgtgtgcctgcggataatagtcaccgccacgggtgatataagtgacaacgtctcctgcagtcggtaaaccggctctttccctgtcctcccgcatccttgaaatcagccggttcaccttctccacatcacattcctttatggagcaggcacacccttcatgcctgttgagcagagtcagactttccaggtcataaaaattaccgtacttcatattgagatcgtttttgttgatacaatttgacctgacgggcaaccatgtcgcagaacttctgtccgttctccttctcgcttctgaaataggcaatcatgtcccagagattccgattgaagtagccggtccatttttcgtaatagtgacctccatagacctttccgaacgtttcctcgaaaagtgcaggagtcagcccttcatccccgtggtggttgtattgccacagggagacaagcagcagctggttataatccagtgtttccatatctgttcttttttaagtaaaacatcggcctacatgggtaggcatttttatttcttgatgtctttcctgtctgttttccggggattgcggcaaggcttggcgaaagaaaataccgcagcgaagcgaggatgattttctttcagccaacccagcccctgaaaggggccgccttgcacaatcagcccggaaaacggctatctttacagcaagaaatgaaaaagcagacctcggattctctgttctgaagtctgcttttcggtcattgtcaagtttcatgtttttcaggtatgtatctgccatccgtggaacggctgcaatgttacggcaaacgacctgtcaggtattccatgatagagcagacctcccacgatacctgtccttccgtcgggatagtgctgtgtgaagccgaacgagtacggggcatggtcatagtagagtgagatttcgcagggataatcaggattcccttcccaactcttcaaccgttccaagcacttttgaagtgaggtgtcaccgatggattcggcatagcgctttacgttctcgaaatgttcttcattcaggattttcataacttttgtatttttatcagttaaacacgtccggctccgggagccggtatttttatttctcgcctgcctgacagtcccgtggccgtacccgcaaggtttggcgaaagaaaataccgcagcgaagcgaggatgattttctttcagccaaccccgcaggggcctgaccttgtacgggtacacaggacacgggactacctttgcagggtgggaaataaaatatacggttgttttttgttgtgggattttgtgtggattccttagataatcttcctgatttgttcgccattgccggacaaatgctgtatttttgcaatttctaatttcaggattatggaaaactatgtaaagaaagcggcggatgctttccttgtggagcgtccgtacggtatgcgtgtggattacaggaagaaaggattcgtgctgtttaaccgtaacctcaatgtgttgggaaatgcggaacagacccgtctggaagaactacctctggagcggttcaatgtggaggagattccgttggagggtgaagtcgtggaggaacacgcgggatttaccgatgtattcttctataccgatctgaccaatccctatgccggatatgtactgaatttgcaaaagcttaaagcctataaccggttgatgtttccgctggcaatggcgctgaaccgtgaattgtgaggccggaagccggtagcggtaacagctgcatggagcagaccgttaccgccccggatttaattatttgccctctttttctgttatgaacgccagatagacggacacggccttatggcatccggtaaagtccggagtccggcagcccttgattttccggaaactgacggttccgttcctgtcaatgcccctcacatgcctgttgaatgtccctttggttctgatatggatgtcaaaaccgtcccttccggtgatttcaaggaacatttctcccgtgatccgttccccgtccaggaatttctgtttctgttcattgagcagccgctgatgttgctcttcctgcactttgcgctcttccgcctctttctccttctgctccctgcgtttctgctcctgtattcttttatattcctcacgggcttgcaccaagggggtggtgtcaagtccgagagcttcgaacacgcggacggagatcaaattgacgaaggctcctctttccgcactttgaagcgtatccgcaatccagttcctgcaataggtggcggcttcctctctgcaaccttctcccttgaggaaccggcgtgaatactgcccgctagagaaataaacgttttcaatccggcagaccacatggaaacagtcatcgtcttcattcccgtattcgttctttctcgacagggagagatatacattctccgcgtacggctccagttccatataaggagccacgacggtattcccatcagacttgtacttgaatacttttgctttcatactatcgttcagtttgtcggttgttgcatatttcatctataatctctttcccgcttctttcacccttcaggaaggcaaggaagcgcctcaaaaagagccgggcacagtcagttcccagctggaagctttcaccgtctttggtagcacatacagcaaaacgccccagtccgaaactgtcctgttgtggtacgatgtggtaagacaagtcctcgcttgcgttgatgtgcaacccacgacggaaaacatagaaagttttcgggattcttctgtcggtatcgatttccatacgcttgtaaccgtgatgttccaataatcggcccagttccctgtttgtcggaattgtatgtccgatccagtccggccagcttatattttctattgtgtgtccgtaattgtcatataatatgttgaactgttcctggtattcatcgtaaaattccccgttcccgttgcacatttcctccaacgcgatgccgtttttacggacaagggcaaggtcgcccagtccgcacgcgatttcattgagcagcgtgcgttcctcatccctgttctttgccgttccgtaaattctaagccgggaatatcggtgtagcgccgaacgggacggcatatccagtttttcccatattccatcgtttcctatagcctgtctggtgtttcccggaagtccgtaccaccacttgtccaaattgtttgtatccataatttctgaatcagattgttttcaaattctgttttgagtaccatgcctgatacgcggcggcatactcctgacgttcccgttccagggaatttctcatttcaggggtgtacccgagcaggcggatgtatcctccgttatagccggtgggttcgcactttattccggcttcctccagtttgtcgatgcgtttttgggccatttttgcgcttgaatattccttcggccaaaaatagacttcgccccgtgagccgaaacagtcttcccccagaattatttccccggcatacttccggctttcgatgatgccgaaacgcgctttgcccaatgcctggcgcattgccttgtgtgccggaccttccggatgcttgaatacctccggcttgtctttgctgccgagtttgggcggttccaccttgtacggctgtttgtaacttccgattccgagcgtcaggtaaaagttggtatgaaaatagtccgtcatgggggcgctgtcatcgaaattgtacgacatgacgaaatcgcagatattcatcattacatcctttgccctgtccgtcaatgatttgtctgaatggatatgatggtggttgacatcgccttgaacttttccggactctttggtgaacgcctcgaaatccgctttcatcaaccggatatggatggagtggtaattctcccgtctggcagagaacttgtatcccggataggtctccttgagccatgcccgtaccagtcccacgatttccggagcgtgctgccccttgtaattgcggcctttccagcggtattcgttatacacatacccggtgtattcctttgccgtggctcccggatagtcatattcatatccggttgaggtcgagggaatatccggtttttctttccaagcctcaaaaagccttccaaactcggtggtcacctgttgcatgattgcggtgtcaccacccttgtccgggtggtgctccaatgccagccggcggtattctttcttcaagtccgccagagagtgtatgttctgaaaataagtcatagccataagttttttatgcccctgcgaggcggttgataaaatattcccggtagtcaagctcaaaaccgaggttgagacaggccgtttccatgtcatcttctctcaggtcgtccgcctcctgcaattcgcgcaggtaccgtatttcggagtccaggtattcctgtgcttccgtttgaccgcaaccgcatgagttgcagatcagactgataatgtttccctgcatgctgtttgattttttatgtttctgttcctgtttctgaggcctcgtccgtcatatatcgagacggcccgttccaccagaatcctgcggttgtcttccgagagttccaggtagaaccgttccgccgcgccgaatgtgcccttgtctgtcgccacgcaccatttttcccagaaatgcgggtacatgccgccatacacggctttgcattcctcctcgctccaggcgttccacatgtagtagaagaaactggagacggtattttccgcttgatatttcatggttcttctatttgtgattctacattgtttgtttctctcagttgatgccacacagcctcatacatctcatgaagccagtctatgttctttgcgccgagttcaaacgggctgtgacactgcacctcgtcaccgctttctttctcttcggcaaggacggtcaggctgtccgccgttacccggagtcctgtcaccctgcattcatatggttctccgttcttgccaaaccatatcacccagaccggatcataatcctcttccggaagacgaatttctttcatgcagtgagcatggagcaactgccgtatcgcgtcgatgatgtccccccgcagttccttgatcctgccgctgaaatcaacggcttctgacggtaaacttccttttccgcctctttcctgcaaggagagaatccgcgtgtcgggatggatacagaaatcccactccaacacttcatcgtcatcgcgtgtcgtgtggatatcgccgcccaaaacaagaccgcaatcgtcatttaccattctttttgcttcatcgcggtcttctgccgctaccgtgtaagtgccctcgaaggaataccttactcttatgtcatatcttttcatgattctttccatttgattgttgataccagattcattgcccggaaggattaccggatattcaatattgcgctaaagacatgtgggtcaagcctgtaaaacgtcggaaggttaagtgtgaccatcgggtagcttacccagccgctctgacgtttatagcctgtatcctcagccaatttgttggacagaaggaactccatggcatcaggattgttgttgatgtccacgaatgccctgtcaggcagtgagaatgccgccttatcttccaggttaaccgtcaggaccgtgtatatctcatgggtcacgggatctttcagagacaatgccggccagccgttatggtatatttcaatcacgattgagagacggctttcctgatacaggaaagtctcttccatggacggatggtcgcatttgataatttcaaaatcatcctcccctttggtaaatgtcaccatcggataggatacatcgacaaaacattcctcttcccggtaacagagatgttcttttccctctgaacggattatagccaatcgggtgttcatattcgtaactggttttaaaattattgacttgcaagttaattggtcggaattcacctgcttgtttctttaaacgtgtgattgtcaccgcctgcggacatttgggagagttgctgtctcaccgccttgattttcccgatcagttcgtcctcccttcggaatgagggggtacatttggtacgcctcatcccggctccccaggggatgccgccgcatacttttctcaggcgtgccttttcgctttccaaggccgactccagacgggccaacctgcgtcgcaacgattcttcggtcacagttctcatgatctcattgtttttttagtatggtgacggatcggaaagacagtcaccataccgtcgttatgtgtcacgttatattttagctttttcccttttgatgcctctcaggacgtacaacaggtgtaggaacagctccctgtcgtaaatccggaagaagaacggctcgcctgtttccctgaccgttccggtaaacgacacggactcccggttcacgggatattggaagaagttgccgtttgccagcagggtgtgctttttcttcatcacttcgcctaggaacctgtccatatcgtcgtttccctcatagccggagaagtagaggaaatgatgacggcgcaggcttcgcaggattttggcggtttccagcctcacatccctgcctgacgattcgtccgttcctctcatcaggttgcagatgaactttttctcgccatttatgtcaagaaacagataaggaactataattatagaggcatgccgtgcgtggccggagatgaccatcggcttttctttctggatgtctcctttgaaggtaatgttccggtaatggttgtccatctgccgttccagctccttccttggcgtggtaacggagcggagtcccgtgaagtagcgtccgcccgcccggaaacagaaccggtagatgtccgcatgataaggctctcccaggaaaaagaaattccgggtatggcggatggggggcaagacatccatgtagtcgaaatatctttcttccgtaatctcactgaacggggcgcagagggattgcaggtggatgcgtatcattttgcggacggtatttccggacacggctgtgagacacgggttcttttccctgtctctcagttcctccagtgtctcatggtggtagtcgccgtgtattccgtcagacatggtggtcacgcagctgccgtcaaaactgcgtgaatcgactacgaatttcagtttgtcgttattcatggttcagatgttttgaaggttcaacactcttttggcggcactgagggcattggaggtgagctgccgttgccatgccttgtttttgggtgaccagcggaatccggaggatttcagttcctttcgtctgctgtcttcaggaatcctgtcaaacaggatctgaaggcggtcttccccatagttccatacaagtgtcccgccctcgaacggcacttccttgttttcccggctttgcatcgctttcagcttttcgcgcatccgttccgccagttccggcaattggaagaatttgtttctcggtgtgatgacgggtttcttcacccttgcgttatattcggaaatgaagtccacggccctacggacgatttccacttccccgtgattggccaaagtggataccttgttcaggatgctgctgacaaacagggcacggctatagccccggcattgtccggtatcaatcccgtggatggtatcggcactgctcttgatgtcgcgtttgagcgtctgccatgccttttcctgtttctcttcctccggtcgtgcggcttcctttttccgtctgacggtttcaagaacttttttccgccaattgcggaattcttcgtaacggttctgatagcttctgttcgttttttcctgcctgtagtaatcaaatccgctccgtcccgtcaccatcgggttggcacagcgggagaggaccgagagctgggcggacaacttctgccggtaggcggcgatgtatgtatcccgttcctcttccggcatgagttgcaggtcgttgtgcagcccctctccgtaaatcatgatgtccgtctcgccgcgaatctccggattgaaggaactccaggcgtatgcgtcgcaagcctgtttccacatatcatccaaataggcaggatgtttgaatgctacggcttcccagtctttgaagtccttggaatgcaattcattgtgatcttccggatttccgtacaggtgtacatagttgcccgttccatgatgctcctttctgaaatggaacggtacggggggatagtccgtaccttttttccggatcatcgtgaccctgtgtgcattctctatggtaaggtctgctacttgctcttcgcagacctttgctgttgtttcattcataatcattacttttttaaatgtcagccgtaaatcatttcttccagttcatcgtccgtcaacaggcggatctcttcgtccgaacaatagtaagcgatttcttcgtccaaatcgaatgctgtcggatcaaggcttctgatgccatccagcagttcctgttccagtctttctacggaaaccagatagttcccatctttgccttgcacttcccgtgcaggatagctcatttcccgataaaccaacatcgtcatttccggattggcttcctgctgtcctttgcttgtcgtctttctgttcatacctttatttttttaagtttgacatgatcggctccatggagccggattttcgttttcttacttgcctggctgtcttttgtcggggattgagcaaggcttggcaaaagaaaataccgcagcgaagcgaggatgattttcttttagccaaccagcccctgaaaggggccgccttgcgcaatcaacccgacaaatggctatatttgcaggtaagaaattgaaaggacggcaggatattgtgaattatagattacaaaaaaagccatccctagggggacggcttaatgactgaatttgtatacttattgtgcaagacgctccttcacgttgttcattgcttctttcaggctgctgttcatgacccgtgcataatgctgtgtcatacgtgtggaggcatggccgagcatgacggaaacatcttgaagaggcacattgttggcaagcgtgaccgtagtcccgaaagtgtgacgggcaacgtgcgtggtcagattcttcttaatgccgcagaaatcggctatttccttgagatagctgttcatcttctggttgcacatgacgggcaaacagcatcctttcttaatgcaggtcggatgttccttgtatttctccaatatggccaggggtacgggcagcaatggaatattgctgatggaagaagccttcctacggtgttccaatttgacccttccttttcttatccaccagtctccgagattgtcctgtaccagattctctttgttcagactggcaacatcggagaatgccagaccggtgaaacacgcgaagacaaagacatccctgaccagttcaagccgtggaatggtgaatttctttttcattacggtctgcaactcgtcataggtcaggaataccggatcggtctcgtcctgctccatcttgtaaccgtaaaagggattcttgcgcatccattcctttgccaatgccatattggtaaatttcttgaagcatttcatataacggactatcgtgttccggcacagtcccgcctccgttttcaggtagatgtcaaacgcacggatgaactccggtgtcagctcatggaaagtgacatcctcctttccgtaataagaggggatgagcagctgtaatttcttcaccacgttcttataccggttgatcgtgacgggagagtagtctatacccgccagtatttccatttccttgatgccttccctcatggtgccgagcagtgtacgcatttcggtgtctttcccgaaaacacgtttaagaatcagttttggggtaatcagggcctgttccaataccagttccttgtgtttttccaaggcgcgtgcgtgcagttcggcaatataggcgttcagtgccactgatgccctgtccctgcctttactgcatcctttggcggcgttccataagttcaggggtacgcttctttggatacgtacatcgtcatagtctccattgatggttatccgcatcaataccggtgcctcaccgtttttcaacaatttcgttttaagcacgaaaaacagaatgttcattgttccttgtttcatcacttttgttttttgaggtgttacattcaattgtttcgtcaaaaccggatggcatgaggacgtggagcgaaatgttaaattcggtggtttttttgagggacttgtggaaaagccataaaaatcccatttttctcaggttcgaattgccttttgtatcccgggttcgattccttttttttatcccgatgggaaataccgaatttttaaatttctttcactttttcgacttcatccggtcatgtgtgcaaaattactttttcacaccggagattggaattgtcaaacagctgaaaaacaatgaagtatggtgcgtatttatggctttttcaaaagccttaaaaaaagccactgaattggcgaaatccaacttcacaaatatgtagcggaatgcgtagtgagggtaaaaaaagaacccttgaactatctctaattcaagggttttcatgtgtgaaaagcatttatgtactttctttggtggtgccaccaggaatcgaaccggggacacaaggattttcagtcctttgctctaccaactgagctatggcaccatgtttatctcttttgcggttgcaaaggtagtgaaacttttggactatgcaatagcttccataataaaaaacgctgataattggctatgtggttaattatcagcgtttatgatttgagaaaaaatactgaaaaagttttatagttatgctttttccgcttcttcttccttcaaaggattccatccttgtgctttgagttcaaactcttgaccgtcacgggtaattagggcgcagcctaattccggtttggtgatatggccaatcagcttgacgccttccatttcggcaaccttttcatggtcggcaatggggacggtgaacaataactcataatcctcgcctccgttcagtgcacaagtgctcaggttcatattgaattcttctgccattacagccgtctgatagtcgataggaatatgttcttcgtagacgcggcaacccactttgctttgggtacagatatgcagtaattccgaagaaaggccgtccgatatatccatcatggaggtgggttgtataccttcttctgccagtttctgaatgatgtcacggcgtgcttcgggcttcagttgacgttccagaagatactccttccccgagaagtccggttgcaagtctttgtcaccttctttgagcaccaccttttcgcgttccaaaagctgtagtcccatgtaggcggcacccaagtcgccgctgacgcaaatcaagtcggtttcgcgggcaccattgcggtagaccacttttcctttctcaccctcgcctatgcaggtgatgctgatggtaagcccggtataggaagcggaggtgtctcctcccacgatgtcaacatcatattcttcgcaagccaaacggatgccggcatagagttcctccatgtcttctatactgaaacgcttggatatgcccaaggaaacggtaatctgcttcggtgtgccgttcatggcatagatatcggagaaattgactacggccgatttataccccaaatgcttgagcggtacatacacaaggtcgaaatggacaccttccatcagcaagtctgtagtaacgagcacttccttttcggccgggtaggagaggacggcagcatcatctccgacaccatatcggctcgactcattctttagttcaatgccttcggtgaggtgacggatgaggccgaattcaccgagggtagctatttctgttctcatgctttcttatgctctattaatcaattcacgcataatctctgtcattctcggttgtgcctcgtctgcagctttctgcacttcttcgtgagaaacttctacgattttaccttctacccccaagtctgtaatgacagatacgccgaacactttgattccgcaatgatttgccacgatgacttccggcacggtggacatgcccactgcatcggcacccagaatatggaacatcttgtattccgcaggtgtttcgaatgtgggaccttgcgtaccgatatagacaccgtgctgaaccttgatgcccttttctgctgcaatggcgtcggccttacgaatcagctctttgtcataggcctcgctcatatccgggaaacgagggccgtaaggtatgtttttgccacgcaatggatgttcggggaagtagtttatatggtcggtgataatcatcaggtcgccgatcgcaaaatccggatttgtgcctccactggcattggaaacgaacaaggtcttgatacccagttcgcgcattacacgtaccgggaaggttacttccttcatggaatagccctcgtaaaaatggaaacgtccctgcatcgccatgatgtctttatggcccagtttgccgaagataagttttccgctgtgtccctctacggtagagacggggaagttggggatttcttcgtaccttatctcatacttttcagtgatttcaccggcaagactgccgagtccggtaccgaggatgattgctgtctcaggctgggtgtgcatctttcccttcagaaaggctgctgtttcttgaatgcgctctaacatagccaataatgttttggttaaatatatattgttgattttgtaaaatttctatttctatcggcagcacgtagatgtacggctttagtgtttcgtccagtgcgggatggagtttcagccttgccgcatctttctccgtggtgattatcagtcttttccactcttccaggtgcaggaattgttcctttatttgcaataaatccttgggagtaaagtcatgatggtcatcaaatgacagcaatttgacgtgcggcgtgtaagattccacttctttctgcaagggggcgggggaggcgatgcctgtcaccagcagtacttgctcgtctccggtgagggaggagagcacttcccagctgttcgttttctcgggaaatagcggggtcaacattccatagcggaatctggagaaatacagttgttggtatggatagaggtggagccgtttggctatgatgttgaagtctatcggcttgatgtcatccggacatttggtgacgatgaccatctgtgcccggtttttaccgcttgaaggttcgcggagtcttccggcagggagcaaggcatcatcgcatagtaaccggtgaaaatcggttagtagaatgttcagtccggcttttacatggcgatgttggaaggcgtcgtccaggatgatggcttctacagtgggattttccagtttcagcagttgctcaatgccgtgacaacggttttcgtctaccgctacccatgcattggggaatttatttttaatttgatacggctcgtcacctatttgccgtacattgctcttgtcatcggccagtacatagcctcggcttttacgcttgtaaccccgactgagggtggctacattcactccgtttttttgtaatagctttatcagatattcggtatgtggcgtcttgccagttccgcccacagcaaggttgcccacgcatattactggaacgtcaaaactctttgaccggagccagccccagtcaaagagtttatttcgcaagcatacccctattccataaagccatgataggggatatagccaatgatatatcttgataaagttttcttccatttattgaatattcagttcaaagggtacacgtgcttgtatacggtcacatttgtcaaaattctccaggacgctgaactgctggtatatctcgcccattgtgcctttcagcatgcgtgctttgacgtagttacccggattggtgttcatcaggctttcaaagaaactttcctttttcggatagctcatcacggtataggcatctactccggcctttgcaatggcaatgtccaaagctttgtccaaaccacccaattcgtcgaccagtcctagttccttggccttgcttccggtccatacacgaccttgggcaattttatccaggtcttccttgctgatgcctcggccatcggagcagcgggtgaggaagaggtcatatccgttgttcacatacatttgcatcagccctttttcaccgtcattcatcgggcgtgtcagcatgccgaagtctgcgtatttattggttttcactacatcaaaatttaccccgattttatcagtcagcccctttgcgttggggaacatgccgaagatgccgatagaacccgtcagtgtggtaggctcggccacgatggtgtctgcattacaagaaatgtagtaacctcctgaagctgcatagtcacccatggaaacaatgaccggtttctctttcttcaattcgctgacggcataccatatctgttctgaaccataggcacttccgcccggtgagtttacgcgtaatactaccgcttttacatcttcgtcatctttcagcttgcgcaggtctttaatcacctttttagagtcgatgccttcttcgctggaggcagaagatgaaccaccgtcaatttctccataggcatagtatacggcaatcacatttccacttttgtctttgggaacgttcttctttacgttaatcatgtcctgcaaaccaagtacgggcatgcggtcgtctttgtcgatgcctaccatcgctttcaggtagttgcgcacatcattcttatatattaatgtatcgaccagtccgcattgcacactttcttctgcgggatagaacatcaacatgcggtcggcaatggcgttcagtgagtctacagatattttgcgtgattctgcaacatcattggtcacttgtccccagatggaggtcaggtaagcgtcgatttgttcacggttggcagggctcatttcggtagagatgaaaggctctacagccgatttgtaggtacctactttgaatatctgcatttccactccgattttggccagcaaatccttgaagaacatgggggtagcggccaagcccctccactcgaccataccttgcgggttcagcaacaccttgtcggctacacttgacagataataaagaccttgggaatagctgtcaccataagctacgatgaattttcccgattccttgaaatccttcaatgcattgcgtatttcttcgcgtgaagcaaatcctgcacccagcgaagttgcttctatatagatacctttaatgttgtcattctcttttgcttttttgatagaggagaggacatcatccaggccataggtcttataattgtctcccataagggcatcgaacggattgtcttggctgcgttcagccagtgcgccattcaaatccagcatcataatggagttcttgcgtacttgcgtttccgactccgaagatgataccatgctgaaaaccaccagaatactgatgaaaactaaaacaacgactgatacgatgatgccggtaatggtggcaaacgtaaacttcagaaaatctttcattgtactttattgtttttagtatgctaacttttaaaagctaacaaagataaataattaggttgatatttaccctatctgtcgctgagtttttcggtttgtcacagtattatgggagatttcattctcttttcttttatctttgaagtatgtcatttcgttctttatggatagttagtttgtaaaatgccagagtataattgctgtcttcttactttctgaatctatttctcctaagaactaatctttccacacccgtgtttctttcttaccacagctgtggtaagaaagaaacacgggtgtggaaagaaagcaacatatctgtggtgagaaaagttgttcattagttcccgtttagtttccgtgctttccggatgtagcctttcgcaggtttattgtcagttctctttgtgattcgcaagcgcggtgccggccgttcagtggtctatgtcaaggtatgaattggagcttgtatttcgcgcgcgtatatatataatgtgtcccttcctttccttatcccagttttctttaaaaaacatgctttaaaacatatctatcaatcagtgagttatgaaaaagttcatggaatctctcaaaaaaaccgtgtataaattttgcagatgttcataaaaggcctacttttgcatccgctttcgggaacgaaggcggcgatgttttgacattctgacagtaaaacggagcggtaagcttccatttttctcttctttgtcatcggtttcttctggaacttcggccttggaaaagaaaaatgaaaaaaaacttctgaaaatatttggaagttatgctttaaagttcttacctttgcacccgcttttgaaaatgaaagcagcgcgagttgacattcttttaaaagaaacggtgcctggttcttcttcctttttctttttgcctccctttcgacaagagagacgacgaggaaagagaaaagagagaaaaaaagaaaaaaaacttccgaaaatatttggaggatatacttaaaagttcttacctttgcatccgctttctgaaaagaacagcaatcgtgaaacgagcgatctttgaacagatttacataaacaatacaagtagtacaagagcaaggcttttccttatcaatggggaattgccttgggtaaaacaagagaaccgtcaatacttattttatataggtaaagataaacttttgaattcgagcgtcctgaacagataacaagctgtcgcacattaattttttttaatttgcgcagtcacgatacttttacaatgaagagtttgatcctggctcaggatgaacgctagctacaggcttaacacatgcaagtcgaggggcatcaggaagaaagcttgctttctttgctggcgaccggcgcacgggtgagtaacacgtatccaacctgccgatgactcggggatagcctttcgaaagaaagattaatacccgatggtatatctgaaaggcatctttcagctattaaagaatttcggtcattgatggggatgcgttccattaggttgttggcggggtaacggcccaccaagccatcgatggataggggttctgagaggaaggtcccccacattggaactgagacacggtccaaactcctacgggaggcagcagtgaggaatattggtcaatggacgagagtctgaaccagccaagtagcgtgaaggatgactgccctatgggttgtaaacttcttttatacgggaataaagttaggcacgtgtgcctttttgtatgtaccgtatgaataaggatcggctaactccgtgccagcagccgcggtaatacggaggatccgagcgttatccggatttattgggtttaaagggagcgtaggcggatgcttaagtcagttgtgaaagtttgcggctcaaccgtaaaattgcagttgatactgggtgtcttgagtacagtagaggcaggcggaattcgtggtgtagcggtgaaatgcttagatatcacgaagaactccgattgcgaaggcagcttgctggactgtaactgacgctgatgctcgaaagtgtgggtatcaaacaggattagataccctggtagtccacacagtaaacgatgaatactcgctgtttgcgatatacagtaagcggccaagcgaaagcgttaagtattccacctggggagtacgccggcaacggtgaaactcaaaggaattgacgggggcccgcacaagcggaggaacatgtggtttaattcgatgatacgcgaggaaccttacccgggcttaaattgcaaatgaatgttctggaaacagatcagccgcaaggcatttgtgaaggtgctgcatggttgtcgtcagctcgtgccgtgaggtgtcggcttaagtgccataacgagcgcaacccttatcgatagttaccatcaggttatgctggggactctgtcgagactgccgtcgtaagatgtgaggaaggtggggatgacgtcaaatcagcacggcccttacgtccggggctacacacgtgttacaatggggggtacagaaggcagctacacggcgacgtgatgctaatccctaaaacctctctcagttcggattggagtctgcaacccgactccatgaagctggattcgctagtaatcgcgcatcagccacggcgcggtgaatacgttcccgggccttgtacacaccgcccgtcaagccatgaaagccgggggtacctgaagtgcgtaaccgcgaggagcgccctagggtaaaactggtgattggggctaagtcgtaacaaggtagccgtaccggaaggtgcggctggaacacctcctttctggagtgacgtctcgactcgatcgttggttcttgaagttatgcttccataagaacctcttgtactgcgcgtacttgtttattaaaatatacgagaaaagtagaagccgagccgtaaggcgagggtttgactgacagtcctatagctcagttggttagagcgctacactgataatgtagaggtcggcagttcaactctgcctgggactacttctcagttggtgaccgaccggttacgatttagcgggtctttcatcaatggtgaagggggattagctcagctggctagagcacctgctttgcacgcagggggtcaacggttcgaatccgttattctccacttctcaagattaggaattatctttaatccttaatccttgacaacgatctttgacatgatgtgaccaaaaaaagtaaagttgaaagctgaaagtatatatcgaccatacgtgatcggtaagacaaaaagtaagtaagggcacatggcggatgccttggctctcggaggcgatgaaggacgtgataagctgcgataagccgcgggtaggtgcaaatgacctttgatccgcggatttccgaatgggacaacccgatatcctgaagggatatcatcccgcaatgcgggaggctaacgcagggaactgaaacatcttagtacctgcaggaaaagaaaataaataatgattcccccagtagtggcgagcgaacggggaacagcccaaaccatccatgttacggcatgtgtggggttgtaggaccacgttgtggcaagaaagttggtgagcagaatgttctggaaagtacagccatagagcatgatagctgcgtatgcgaagccaaccgaagcctagtggtatcctgagtagcgcggagcacgaggaattctgcgtgaatctgccgggaccatccggtaaggctaaatactcccgagagaccgatagtgaaccagtactgtgaaggaaaggtgaaaagcacttcgaacagaagagtgaaatagttcctgaaaccatgtgcctacaagcggtcggagcacttttagtgtgacggcgtgccttttgcataatgaacctacgagttactttttccggcgaggttaaggatctcagatccgcagccgaagcgaaagcgagtctgaacagggcgtatagtcggaaggagtagacgcgaaaccaagtgatctacccttgggcaggttgaaggatgggtaacaccatctggaggaccgaaccaataagcgttgaaaagcttctggatgacctgagggtgggggtgaaaggctaatcaaacttggagatagctcgtactccccgaaatgcatttaggtgcagccttgacttatactgacatgaggtagagcgactgataagatgcgagggcttcaccgcctatcaagtcttgacaaactccgaatgcgtgtcagttctatgtcaggagtgagggcatgggtgctaaggtccatgtcctaaaggagaacaatccggaccaacagctaaggtcccgaaatgaatactaagttgaactaacgaagtcagattgctaagacagctaggatgttggcttggaagcagccattcatttaaagagtgcgtaacagctcactagtcgaggagtttggcgtggataataatcgggcataagtattctaccgaagctttgggatgagaaatcatcggtaggggagcattccactctgcgtcgaaggtaaggcgtgagccttgctggagcgtgtggaaaagcaaatgtaggtataagtaacgataaagggggtgggaaaccccctcgccgaaagactaaggtttcctgatcaacgctaatcggatcagggtaagtcgggtcctaaggctcagccgaacggcgaggccgatggcagaaccggttaatattccggtactaccttaaggagtgacgtggagacggagtcgtgacagcgccgcggactgacggaatagtccgttgaagggtgtagatgttgattgttctaggcaaatccggaacgagagtcgaacctgacagtatggagcgtccttctggacaatccaatagtgcgtgtaatcatacttccaagaaaatccgctaaacttaatccttacggtacccgtaccgcaaacggacacacgtagtcgggttgaatatactaaggcgcttgagtgattcacggttaaggaactaggcaaactgaccctgtaacttcgggataaagggtcctcaagcaattgaggcgcagagaataggtccaggcaactgtttaacaaaaacacagggctgtgcaaaattgaaagatgaagtatacagcctgacacctgcccggtgctggaaggttaagaggagacgtcatcgcaagagaagcgttgaattgaagccccagtaaacggcggccgtaactataacggtcctaaggtagcgaaattccttgtcgggtaagttccgacctgcacgaatggtgtaatgatctggacgctgtctcaaccgtgagctcagtgaaattgtagtatcggtgaagatgccgattacccgcgatgggacgaaaagaccccgtgaacctttactatagcttaacattgaatttgggtaattgatgtgtaggataggccggaggctttgaagcgggcacgccagtgttcgtggagccgctgttgaaatacggccctttgattatttgagttctaacccgctgttgcggggacactgtttggtgggtagtttgactggggtggtcgcctccaaaagcgtaacggaggcttctaaaggtgccctcacgacgattggtaaccgtcggcagagtgtaatggcataagggcgcttgactgggagactcacaagtcgatcaggtaggaaactagagcatagtgatccggtgtttctgtatggaaaggacatcgctcaaaggataaaaggtactccggggataacaggctgatccctcccaagagctcatatcgacggaggggtttggcacctcgatgtcggctcgtcacatcctggggctggagaaggtcccaagggttgggctgttcgcccattaaagtggcacgcgagctgggttcagaacgtcgtgagacagttcggtctctatctatcgtgggcgcatgaaatttgcgtggctctgacactagtacgagaggaccgtgttggactgacctctggtttaccggttgtgccgccaggtgcattgccgggtatctaagtcgggattggataagtgctgaaagcatctaagtacgaagccagccacaagattagatttctcagggtcgttgtagactacaacgttgataggacgcaggtgtacaggcagcgatgtcatagccgagcgttactaattgcccgttcactttttgccttgccttgtatggaggtatatacgttcagccataaatgaatgctttgcttttttcgcatcatgtctaccttattcaggtgactacagcaccggggttccacctcttcccattccgaacagagaagttaagcccggtcacgccgatggtactgcgtaacagtgggagagtaggtagtcgccgtttttcagaagaagcctccgtgtctgataaggatacggaggcttcgttcgttttggcggtctcataaacttttcgtatatttgcgtcgaactaattttatatcaacgtttaaagcaaattgaaagtatgaagactaaagttttattggctgccgttgcggtagcgttttctttcgcagtgacatcttgtggcaacaaaaaggctgcagattctaatgtaactgaggtggattcttgctgcgcagcaaaaacagaacaagtgtgtgactctgctaaggcttgctgtgagggtgctgactctgctgcttgtgacagtgcgaaatgtgagaaggcttgtgataaagctgcttgtgataagaaagaagattgcaagaaagcttgtgataaaaagtaattcaagacttgtattaaattgtgcaataggaaaaggcatactgtaaagtatgccttttttgtgatatatttaagtaataggtgaatgctaacttataaaatgaaactgtttctttgaaaaaagtaatgaatttgtttgtgtgatacgaaataatatctacctttgcaacgtcaaaacaaaaaagaagatgattcagaactttacatatattctactgtgtggtattattattctactggcaaagtttagtggaagtgagtgctgtgcgtgaatatatatgtaagatgcaatgatatatgaagcctttctcacttccaagtgcgaaaggctttttttatgggacataaattaaatacaataaagcaatgagtgacaaattatttattttcgacacaacgctccgcgatggcgagcaggttccgggatgccaattgaatacagtggaaaagattcaggtagccagacaactggaagccctgggggtggacgtgattgaagccggatttccgatttcaagtccgggagatttcaattcggtcattgagatatcaaaggctgtgacatggcccaccatctgcgccttgacacgtgccgtacagaaagatattgatgtggcagcagaggctttgcaatttgccaagcataaacgtatccatactggcatcggtacatctgactcgcacattaaatataaattcaattccaatcgcgaggaaataatagagcgtgcagtggctgccgtaaagtatgcacgtaagtatgtggatgatgtagagttctatgccgaagatgcaggccgaacggataatgaatatttggcacgggtggtagaagctgttatcaaggcaggtgctactgtggtgaatattcccgatacaacggggtattgcttgcctgatgagtatggcgcgaagataagatatctgatggaacatgtcaacggtattcataatgccattatttctactcattgccacaatgacttgggcatggctactgccaatacaatggctggcgtgctgaatggtgcccgccaggtggaggtaaccatcaatggtattggtgaacgtgccggcaatacttctcttgaggaagtggcgatgattatcaaatgtcacaaggacatagaaatcgagaccaacatcaatacacagaagatttatccaaccagccgtatggtgtccagcctgatgaacatgccggtgcagcccaacaaggctattgtaggtcgcaatgcttttgcccattcgtcgggtattcaccaggacggtgtattgaagaatgtgcagacgtacgaaatcattgacccgcatgatgtgggtattgatgataattctatcgtattgacagcccgtagcggacgtgcagccttgaagaatcgtttgtcgatattgggagtacagctggatcaggagaagctggacaaagtgtatgaagagttcttgaaacttgccgataagaagaaagatatcaatgatgacgatattctggtattggcaggggcaaatcgtacgcagaaccaccgtatcaaactggaatatcttcaggtgaccagtggggtgggggttcgttcggttgccagcttgggattgaacatctccggtgagaagtttgaagccgctgccagtggaaacggtccggtagatgccgctatcaaggctttgaagaagattatcgaccgccatatgacattgaaggaattcaccatccaggctatcagcaagggtagcgacgatatgggtaaggtacatatgcaggtggaatacgataatcatatttattatgggttcggtgccaatacggatattatcgcggcatcagtggaagcgtacatcgactgtatcaataagtttaagatgtgattttaatcgtaaattgtaaatagctaaattgtacataaagagatgaatacattatttgataaaatctgggatgcccatgtggtacagaaagtggaagacggtcccacacagctttatattgatcggctttattgtcatgaagtaaccagcccgcaagccttttcaggattgcgcgaacgtggaatcaagtgtttccgtccggaaaagattttctgtatgcccgaccataacacgccgacgcatgaccaggacaagccgattgaagacccggtttcaaagactcaggtagatacactggccaagaatgcggaagagtttggattggtccatttcggcatgatggacaagaagaacggaattatccatgtagtaggtccggaacgcgggctgaccctgcctggcatgaccattgtctgcggtgactcgcatacttccacccacggggcgatgggagcagtggctttcggtatcggtacgagtgaggtggaaatggtaatggcctcgcaatgtatccttcagacccgtcctaagacaatgcgcatcactgtcgacggcaaacttggcaagggagtgacggcaaaagatgtagcattgtatatgatgtcgaagatgacgaccagcggcgctacgggatatttcgtggaatatgccggagaagctgtgcgtggtctgactatggaaggccgtctgaccttgtgcaatctgagtatagagatgggtgcccgcggcggtatggttgctccggatgagaccactttcgagtatattaaaggacgcgaatatgctccgaagggtgaggcatgggacaaggcattggcctattggaaaacattgaagagtgatgaggatgcagtgttcgacaaggaagtccgttttgctgccgaagatattgaaccgatgattacatacggtaccaacccgggcatgggtatgggtatcacacaacatattcctactaccgaaggcatgggagaagctgcccggacctctttcatgaagtctatgagctatatgggtttccaaccgggagaacctttgctgggtaagaaggttgactatgtgtttttgggtgcctgcaccaatgggcgcattgaggatttccgtgcatttgcctccattgtgaaaggtcgtcagaaagccgggaatgtagtggcatggctggttccgggctcctggatggtagatgcacagattcgcgaagagggactggacaagattttggaagaggccggttttgccattcgccaaccgggttgctccgcttgcctggcaatgaacgacgataaggtgcctgccggaaagtatgcagtgtctaccagtaaccgtaattttgaaggacgccaggggccgggttcccgaacactgcttgccagcccgcttgtagctgcagcagcggcagtgactggagtaattactgacccgagaacgctgatttgatgtacgattggacgatttacgattaaaattacttcgtaaatcaaacatcgttcaacaaaggtaaatcaagagtattttcaatcgtaaattgtaaatcgtaaatacaaagatgaagacaaaatttgatataataaccagtacttgtgtgcctcttccattagagaatgtggatacagaccagataatccctgcacgttttctgaaagctactacccgtgaggaaaagttcttcggagataatttgttccgtgattggcgctatcatccggacggttctctgaacaaggactttgttttgaacaatcccacttacggtggacagattctggtggcgggaaagaacttcggttccggttccagccgtgagcatgctgcatgggccattgccggttacgggttccgcgtggtggtatcgagcttctttgccgatatacacaagaacaatgaactgaacaactttgtgcttccggtggtggtaagtgagccgttcctgaaagagttattcgactctatctctgccaatccgaagatggaagtggaagtgaatctgcccgaacagaccatcaccaacaaggctacgggcaagagcgaacattttgaaatcaatgcctacaagaaacattgcctgatgaatggcttggatgacatcgattttctggttgagaataaagataagatagaagcttgggagaataaaaatgaagcataatcatccgaagatagaaatcatggacactacgctccgcgacggtgaacagaccagcggagtctcctttgtgccccatgagaagctgatgattgcccgtttgttgctggaggaattgaaggtagaccgggtagaggtggcttctgcgcgggtatccgaaggagagtttgatgccgtaaaaatgatttgtgactgggcggcacgccgtaatcagttgccaagagtagaagtgcttggctttgtagatggccacacgtcggtggactggatacatgcgaccggttgccgtgtcatcaatctgctgtgcaaaggctcgctgaagcattgcacctaccagttgaagaagactcccgaagagcatatcgaggatattctgtccgtagtggattacgctaacgagcaggatatggtagtgaatgtctatctggaagactggagcaacggcatgaaagattctccggaatatgtgttccgtctgatggacgccttggagcagaccaatatccgccgttacatgttacctgacacattgggcgtattgaacccgctacaagtcatcgagttcatgcgcaagatggtgaaacgctatccgtatgcccatttcgacttccatgcccacaatgactatgaccttgccgtgagcaatgtgcttgccgccgtacttagcggttgtaagggactgcatactaccatcaacggcctgggcgaacgtgccggcaatgctccgcttgccagtgtgcaggctatcctgaaagaccacttcaatgccattaccaacattgacgaaagccgcctgaacgatgtaagccgtgtggtggagtcctactcgggtatcgtaatccctgccaataaaccgattgtgggcgagaatgtatttacccaagtggcaggcgtccatgccgacggtgacaataaaagtaacctctactgcaacgaccttctgcccgaacgctttggccgcaagcgagagtatgccctgggcaagaacagcggtaaagccaatatccggaagaatttggaggacttgggattacaactggatgaagatgccatgcgcaaagtgaccgaacgcatcattgagctgggcgacaagaaggaactggtgacgcaagaagacctgccctatattgtttcggacgtactgaagcacggaatggcagaagaacgcgtcagccttaagagctatattgtgaatctggcgtatggattgaagccgatggctacgttgaagatagaaatcaacggaaaggaatatgaggaaagttccagtggagatggccagtatgatgcttttgtgcgcgccttgcgcaagatatataaagtgacactgggccgtaagttcccgatgctgacgaactatgccgtgaccattcctcccggcgggcgtaccgatgcctttgtgcagacggttattacctggagttttgaagatacgatattccgtacacgcggattggacgcagaccagacggaagcggccatcaaggcgacggtgaagatgttgaatatcatagaagacgaatacgaatcataaaaaatggatcttatggagaaaaagaaatcgttttttgagaggcgtccttatgtatgctatgcgttgtatgcaggcttgctttttgctttcaacctctttctgcgttggtggagcggcgagttggatgcggacgagtatcttatgtcagccatcaatacccttatattgacagctggttttgtgtggggtgaccggtatcgccgcaagaatcttgcaaacaaaaagaagatagatgaacttttaaataataaataaaacaatggattttaaaattgcagtgttggccggtgacggtatcggccccgaaatctctaccgtaggcgtggatgtgatgactgccgtgtgtgagaagttcggacataaagtgaactatgaatatgccatctgcggtgcagacgcgatagacaaggtgggtgacccgtttcccgaagccacttatgaggcttgtaaaaatgcggatgctgtattgttctctgccgtaggtgacccgaaattcgacaatgaccctactgccaaagtgcgtcccgagcagggcttgctggctatgcgcaagaaactgggactgtttgccaacatccgtcccgtacagaccttcaaatgtctgctccataagtctccccttcgtgcggaactggtggatggtgccgatttcctttgtatccgcgaactgaccggtggcatgtacttcggtgagaaataccaggacaatgacaaggcgtatgatacgaacatgtatacccgtcctgagattgaacgtatcctgaaagtcggatttgaatatgccatgaaacgtaacaaacatcttacggtggtggataaagccaacgtgcttgcctcttcccgcctttggagacagattgcccaggaaatggcaccgcaatatcccgaagtgacaaccgactatatgtttgtggacaacgccgctatgaagatgattcaagagccgaagttctttgacgtaatggttacggaaaatacgtttggcgatattttgacggacgagggttcctgcatcagtggctctatgggattgctgccttctgcttctacgggagagagcacgccggtattcgagcctattcatggctcctggccgcaagcgaaaggtttgaatatagccaatccgctggcgcaaattttgtctgtagccatgcttttcgaatacttcgacctgaaagaggaaggggcgttgattcgcaaggcagtggatgcttcactcgatgcgaatgtacgtacaccggagattcaagtagaaggtggagacaaatacggtaccaaggaagtgggcgcttggattgtagactatcttaagaagtcttgatgccagtatcccattactgttctgtccatcagtaacttcccactgtaaagttctgcaaaaagcatgcaccatctttgcagtgggaagtcgctgattgtcagatatggttcttccttcccatttttccttcttcaatcgtttcatatcctttcatcctctttattcgtgttaagctttggtagatggcagcataatctttcctttcccgcacggtttatttcttggaatttgcatatctttgtcagcatatccatgcaccgcaagtatgtgcgggaagaatgtattagacaataagattatggcgaaaattgcaaagaacctgacggagttgattgggcatactcctttgatggaattggctgaatacagccgtaaatacggattgaaaagaaacgtagtggcaaaactggaatcttttaatccggcgggaagcgtgaaggaccgtgtggcatttgccatgattgaggatgccgaggcacgtggggctttgaaacccggagctacgattattgaacctaccagtggcaataccggcgtgggactggcgatggtggcaaccatcaagggataccatttgatattgaccatgccggagaccatgagtgtggaacgccgtaatctgttgaaagccttgggcgcggagattgtactgaccgacgggctggcaggtatgtccggctccattgccaaagcgaaagaactgcgggatgcgatacccggtgcggttattctgcaacagtttgagaatccctccaatgccaaggctcatgaacatactacgggggaagaaatctggacggacacggatggcaaagttactgtttttgttgccggtgtgggcacgggcggcacggtctgtggagtggcgcgtgccttgaagaaacacaatccggatgtctatgttgtggctgtagaacctgcctcctctccggttctggaaggaggggaagacgcaccgcaccgcatccaggggattggagccaattttattccttccatttatgatgcttctgtagtagacgaggttattccggtacccgatgacgaggccattcgtggaggacgggagctggcttctacggaaggcttgctggccggcatctcatccggtgcagcggtatatgcggcacggttgctggccgaacgccctgaatttgcggataaaatgattgttgccctactgcccgatacgggggaacgctatttgtcaacagaactgtttgctttcgatacctatcctttggaataaatactgaacgattatatgaagaaatttattttttctttccttttgtgtggagccacgatgttttctgccttttcacaaacctatcaagaactgagcgaacgtgcggttgcagccacggagcaggatagcttgtcattggccgaaaaatacattgaacaagctttgaaaatggagcctgccaaccctcataacgctttgctgttctccaacttgggaacgatacagcgtcggcaacaccggtatgagcaggcccttgactcgtatactctggcattgaacattgctccgcgtgccatacctgccctgatgaaccgtgccgctctttatcttgagttggggaaggatgatttggcccggatagactattctttggtgctggatatagagagcgataatcaggaagccttgctaatgcgcgcctatatctatatgcggcagcgcaactataattttgcaaagtctgattatgaacgtctgctgaaacttgccccccggagttacaatggccgtctggggttggctacactggagcagaaggagggcaaatatgaagcggcgctttcgatattgaatgccatgattgcagaaaaaggaggagaagctacccggctgactacccagcaatatgccgtactttacgtagcacgtgcgggtgtagagcaggatatgaaacatgtggacctggccatgatggacttggaagaagccatcaagctggatgcttcgcagacagaagcctacttgatacgggggcaaatttacctttctcaaaagaaaaaggagttggcaaaacgtgacttcgaaaaagccatttcgcttggcgtgccgcaaggtgacctcagggatttactgttacagtgtaaataatattcaactgtatttccgtatcagttccacaaactcttttccgtatttcttctttttatattcaccgataccgctgatattaccaaattcttctatggtagtggggcgggaggcgctgagtaggtggagcactttgtcggacagtacgatataggcaggaagtgcttcctggtcggcaaggcgtttgcggagaatgcggagagcctcgaaaagttccccactttctgtattgggcaatcccaatggcaattctttggttggaactgtagccttgcgtttacggcctcttgtagtttgtacagcttcctcgcggcggatggtgacaagcagggtgcgtgctctgccaaacaagatatctgttccgctttgagtaattttcagatggttgttttcattgtaggctatttcgaaatagccgagttgcaacatttgcagcaggtagtcatgccaatctctggcgggtacttcacgcccgactccaaaggtcttaagacgatggtatcctctttctgtaacttcagaactcatgttccctctgaggatgtccactaaaataccagtccctatctgttgttcggaacgcgcgattgcactaagtgctttttgtacgattattgtaccatcgaaacgttcagggggatttttgcatacatcacagtttccacagtcgcaggtcgtattttcaccgaaatagcttaacagaatgcggcggcggcagatatctgcttccgcatattgctgcatgcgttgcagtttttccaggttgatgctttgctgtccactgtccgttgcgaatttagtgagcagaatgaggtcggccagtgaatagaacaaaagggtgtcactgggcattccatcccgtccggcacgtcctatttcctgatagaaactttcaatgcttttgggcaaattgtaatgaattacccagcgtacattgcttttgtcaattcccattccaaaggcgatggtggcgcataccacttgcacgcggtcattgatgaagtcgtcttgcgcttcatctcttcgtgccggtgacagtcctgcatgatagaccgctgattttatcccttgtttttgaagcatttgtgccactgtttcagtcttgctgcggctcatgcaataaataatgccgctctctcccggatggcgggcaatgaagtcgaggatggctttgcttttttccttctgctggtaacctctttttacggtgaggctcaggttgggacggtcgaaagatgaaatgaaaaccctgggttggttgaggtgtagctgtttaataatatcttcacgggttattttgtcggctgtggcagtaagtgcaatgatgggaacctggggaaactgttggtgaaggatgcccatctgtgtatattccggacggaaatcgtgtccccattgtgagatgcagtgagcttcatcaatggcgaaaagggaaatatgcatatctcttaacagatagttggcttccgtcaataatttttcaggagaaatatatagtagtttcagcttgccttccatgcatgcacgtcgtagggaagcattctctgtttcatcattattgctgttcagtgcaccggccgcgatgccgtttgcacagagcgtttccacttggtccttcatcaaggaaatgagcggagaaaccactaccgccgtgccttcactcaataaggcgggaagttgatagcagatggattttccgcctcccgtcggcatcagtaccaatgcgtctttacggtccatcagatggcgtatgatgtcttcttgtaaggggcggaaactgtcgtaaccgaaatatgtcttgagcgtttgtagcataatctggcagtgtggatttcttccgacaaaggtacactaattattgcatatactacaaatggaaagtcatcaagatttagtatcatatgagtttccgcaaaaggttaaagtttcttattaatggctgaattgagctacttttcaacctttttcgttgtttatttatcaaaaatatatacgggaaaagttgtgtattaaaaaaaaatgtctgacttttgtaaagtctaaagggctaaccctttggcttttccgattttaaacaaccctaaccagttaattcaatgagtgatttagaaaacaatgcccaggaaaaaggaacgaagaaacgtccttacaacctgcgcgaaaagaaagaaaagaatgctgcctaccgttctttgataaggccggaattggcagatgagttgtatgacaagatattgaatatcgttgttgtacaaaagaagtatagagatgctgattattccgctaaggatttggcgaaagaattgcagaccaatacccgctatttatctgcagtggtgaattcacgcttcggcatgaactactcttgcctgctgaatgaatatagagtaaaagaagcgcagcatttgttgacagacaaaagatatgctgacaagaatgtagaggaaatcagtacgatggtaggctttgcaaaccgtcagtctttttatgctgctttttataaaaatgtaggtgagactcctaatggatatcgtaaaagacacgctgaaaaagaggctaagaagaaataattctgtatgattgaatgaataaaaaggaaatatttcggaacagttgtttcgggatacttccttttcttcttttttaataccaatccatatattcccgacacatgaagaaacaactgatttctatggtgactgccctttctctattgacggcttgtggcggaaatccgaaaacaactgctgaggcagaaaaatttgactatacagtggaacaatttgcagatttacagattttacgttaccgtgtaccaggttttgaggatttgtccctcaaacaaaaagaattggtttattatttgacggaagcggctttgcagggtagagacattcttttcgatcagaatggcaagtacaacctgacgattcgccggatgttggaggctgtctataccggctataatggagataagaacactcctgatttcaaggctatggaagtgtacctcaagcgggtatggttctccaatggcattcatcatcactatggcagcgaaaagttcgttccgggatttactcccgaattcttcaggcaggctgtacagagtgtggatgcagctacgttgccgcttgccgaaggacagactgtggaacaactatgcgaggaagtattccccgttatttttgaccctaaagtgatgcccaagcgggtgaatcaagctgccggtgaagatttggtattgacttccgcatgcaattattatgatggcgtgacgcagcaagaagccgaagacttttataatgccttgaagaatccgcaggatgaaactcccgtttcctatggtttgaacagccgtttggtgaaagaggatggcaagattcaagagaaagtatggaaagtgggtggtttgtatggacaggcacttgaaaagattgtctattggctgaagaaggcggaaggagttgccgagactcccgagcagaaggcggtgatagccaaactgatggatttctatgaaaccggcgatttgaagacattcgatgaatatgccattttgtgggtgaaggatttgaactcacgcattgactttgtgaacggttttaccgaaagttatggtgacccgctcggcatgaaggcaagctgggaatctctggtgaattttaaagatttggaagctacccggcgtacagagttgataagcggcaatgcacagtggtttgaggaccattcaccggtagacggacaattcaagaaggaaaaagtgaaaggggtgtctgccaaggtaatcacggcggctattctggccggtgacttgtatcctgcaacagctatcggcatcaacctgcccaatgcgaactggatacgtagccagcatggttcgaaatccgttacaatcggtaacattacagatgcttataacaaggctgctcatggcaacggattcaatgaggagtttgtgtacagtgatgcagagcttcaactgattgataagtacgcagatgtgacagatgaactgcatactgacctgcatgaatgtttgggacatggttccggcaaattgcttccgggtgtggacccggatgcgttgaaggcgtatggctctactattgaagaggcacgcgccgacttgttcggactctactacgtggccgatccgaagctggtggaactggggcttactccaagtgcggatgcttataaggctcaatactacacctatctgatgaatggtttgatgacacagcttgtacgtatcgaaccgggcaacaatgtagaagaagcccatatgcgtaaccgccagctcatagcgcgctgggtgtatgaaaatggtgcggcggagaaggttgtggaattggtaaagaaggatgggaagacgtacgtcgtgataaacgattatgagaaagtgcgtgacttgtttggccggttgcttgccgagatacagcgtatcaagtccaccggtgactatgccggtgcccatgatttggtggaagcctatgccgtgaaagtcgatcccgctttgcatgccgaagtgctggaacgctacaagaagctgaatcttgcgccgtataagggtttcgtcaatccgaaatatgaggcggtgacggatgccaacggtactataacagatgtgacagtgacttatgatgaaggttatgcggaacagatgttgcgttatagcaaagactattctacattgccttctgtcaataaatgatgaactatgatagatactaaagagcagctgcatcagcggctgaaagatataaagacacagctccgtctctcaatgaacggggctgtgtcccaaagtatgcgtgaaaaagggctggtatataagctgaactttggcgtggagctgccccgtatcaagggtattgctgccggttacgagaaggaccactctctggctcaggctttgtggaaagaagatatcagagagtgcaaaatattggcgggacttttacagccagtagagagtttcctgcccgagatagccgatatctgggtggaagatatccgtaatatcgagattgcagaacttactagtatgaatttattccaacatcttccttatgcgcctgccaagtccttccattggattgcaagcgaggacgaatacacgcaggtttgcggcttcctcaccatagcccgtctattgatgaagaaaggggatatgagtgaacgggttgaaaatgagttcctcgaccaggcaataacggcttttttgtcgggctcctatcatgtgcgcaatgcagccatgaccgctatccgccgttttatgcagcaaaatgaggaaaattcttttcaagtttgccgcagggtggagggtatggacaattcttcttctgatgtagaacaattactatacaatcttgtaaaagaggaggtttgttagattagttctatggttatagagactgatgcggtaagggaatatttcccttatcgcaatttttatctctttctcgtttgctttccacaaaaaaggattaactttgttggctgtaaaactgcgccgtcaaatggaaagtcagaatgtgaaagatacagttaggcagatattcactgaatatctgaatgcgaacgggcatcggaagactcccgaacgttatgccatacttgacaccatttactccatagacggtcattttgatatcgacacgctctattcactgatggccgaccaggagaatttccgcgtcagccgtgcaacgctttacaataccatcattttgcttataaatgctcgtctggtcatcaagcatcagttcggcaactcttcccaatacgaaaaatcttataatcgcgatacacaccatcaccagatatgcacccagtgcggaaaggtaactgagtttcagaacgaggagttgcagcatgccattgagaataccaagctgagccgttttaatcttacgcactattccttatatatgtatgggttgtgcagcaagtgtgaccgggccaataaacggaagaaaaagaataataaccataaaaaagaaaaatgaaagtagacgtattattaggattacaatggggcgacgaaggcaaaggcaaagtcgttgatgtgttaactccgagatacgatgtcgtagctcgtttccagggcggaccgaatgccggacatacactcgagtttgaagggcagaagtatgtgctccgttccattccgtctggaatattccagggggacaaggtgaatatcattggtaacggtgtagtgcttgacccggctctcttcaaagcggaagccgaatctttggaagcgtctggccataacttgaaggaacgcttgcacatttccaagaaagcacacctcattctgccgactcaccgcatactggatgctgcatacgaagcagccaaaggcgatgcaaaggtaggaacgaccggaaaaggcatcggaccgacttatacggataaaatcagccgtaacggtgtgcgcgtaggcgacattctgcatgactttgacaagaagtatgcagcggccaaggcccgtcatgaacagatattgaagagcctgaactatgagtatgaacttgcagaaatggagaaggcatggttcgaaggtatcgaatacttgaaacaattccagttggtggacagtgaacacgagatgaacaatctgttggctgtcggcaagtctgtattgtgcgaaggcgcgcaggggacaatgctagacattgatttcggttcttatccgtttgtcacttcttccaatacggtctgtgcgggtgcttgtaccggtctgggtattgctcccaacaagattggtgaggtatatggtattttcaaggcctattgtacgcgcgtaggtgccggtccgttcccgacggaattattcgacaagaccggtgaccagatttgcacgctggggcatgagttcgggtctgtgactggacgtaagcgccgttgtggttggattgacttggtggcattgaaatacgccattatggtagacggggttaccaaactgattatgatgaagagcgatgtgctcgattcttttgaaaccattaaggcttgtgtagcttacaagatggatggggaagagattgattacttcccgttcgatatcaacgagactattgaaccggtttatgtagagctacccggttggcagacggatatgaccaagatgcagagtgaagatgagttcccggaagaattcaatgcatatttgtcattcctggaagaacagcttggtgtgcccatcaagattgtttccttgggaccggaccgtgagcagaccatcgaacgatatacagaggaataataaaacaaacagataaccttaggcacggattacacggatttcgcggcttcatctgaagaaccgtgggtgtccggataatccgtgccttttttatttattgccatgaaaacacgtcttttgtcttttttactgctgttgctccttgtgccctccgcacagtcgcagacttatcagccgacggaggaaaatctgaaatcccgtcaggagtttcgtgacaaccgattcggtatcttcctgcattgggggatatacagcatgctggctactggagaatggaccatgacgaacaagaaccttaattataaggagtatgccaaactggcgggaggcttctatcctgccaagttcgatgccgccagatgggtgtcagccatcaaagcgtccggggcaaagtatatctgcttcacgtcccggcatcacgatggcttttccatgttccacacacgcttttccgattacaatattgtggatgccaccccttttaagcgggatattctgaaagaattggcagacgagtgccacaagcaaggtatccgtctgcatctctactattcgcacattgactggtatcgcgaagatgctccgtggggacgcaccggacgtggaacgggacggccgaatccgaagggcgactggaacagctactataaattcatgaacaaccagctgaccgagttgctcactaattatggaaaaataggtgccatctggtttgatggctggtgggaccaggaccagaatccggatttcgattggcaactgcccgggcaatatgccatgatacaccgcctgcaaccggcttgcctggttgggaacaaccatcatcaagcaccgtttgtcggcgaggacatccagatattcgagcgcgatctgccgggagagaaccgtgccggcctttccgggcaggatatcagcgccttgccccttgaaacctgcgagacgatgaatggaatgtggggatataagattacggaccaggattataaatccaccaaaacgctgatacattacctggtgaaggctgcgggtaaagatgccaatctgctgatgaatatcggtcctcagccggacggtgagctgcctgctgttgcattggagcgtctggcagaagtaggggaatggatgaaggtatacggtgaaaccatctacggaacccgtggcggctgcattgctccgcatccttggggagtcactacacaaagagaaaataaattatacgtgcatattctcgaattgcaggataaggctctcttcctgccgttggaaggcaagaaagtgaggaaggcagtggggtatgccgaccgtcttccagtgaagttccgtaagtgtgaaggaggggtgatgctttacttgccggaggttccgacggatatcgataaagtgatagaggtggagattgaaaaataaattataaatcagaaatctttaattcttcctaaaagataaaggaaacgctggcattgctcaccgtttccttttatttttggcagactatttgttatacaataagaaacgactgatttattcacaatttaaagaaagaaaattatgggaacaggaatgataggaatgcaatggattatttttatcggtattgccgtcgtcagctggctggtacagatgaatcttcagaacaaattcaagaagtactctaaaatccctaccggcaacggaatgacgggagcagacgtggccttgaagatgctgcacgataatggcatctacgatgtgactgtgacgcatactcctggacatctgaccgaccattataatcctgccaataagacagtaaacctgagtgagagtgtttatagcagtaacagcatcatggctgctgccgttgcagcccacgaatgtggccacgctgtgcagcatgcgcgtgcatacgctccgttgacaatgcgcagcaaactggtgccggtagtctctttcgcctcacagtggatgacgtggctgctgctggcaggtattttgatgctgaactccttcccgcaactgttactggcgggtattatactgtttgcgttgactactttgttcagcttcatcaccttgccggtggaaatcaatgcaagtaagcgtgcgctggtatggcttagcaattccggcattacaaattcatataatcatgcacaagcggaagatgcactgcgttcggctgcctatacgtatgtagtggctgctctcggttcgcttgctaccttgatttattatatcatgatattcttgggacgcagagattaagtatatgatgcagacataaaaacagaccatctgttccatacggacagatggtctgtttgctttagatggatagtctgtttatatcaaacagctcatctgttgtgtattattcaaccttttctgtaaaggtgtaagttcaaagcttgtttttgtcacttttatactgcagtaatggcataaagataaacattctcttttctcaatcaataaaatactgtaactttgtcgtccgatttttaaaatgattgaactgattatggcagcaaaaccaagtattccgaaaggaacccgtgacttctcgcccgtagaaatggcgaagcgtaactatatattcaatacgattcgtgaagtgtatcacctctatggcttccagcagatagaaacgccctcaatggaaatgctttctaccttgatggggaagtatggtgaggaaggtgacaagctcttgttcaaaatacagaattctggtgattatttctccggacttacggacgaagaactgttgagccgtaatgcagtgaagcttgccagtaagttctgcgagaaaggtttgcgctatgacctcacagtaccttttgcccgttacgtggtgatgcaccgcgatgaaataactttccctttcaaacgttatcagatacaacccgtgtggcgtgccgaccgtccgcagaaagggcgttatcgtgaattctatcaatgcgatgccgacgtggtaggcagcgattccttgctgagcgaagtggaactgatgcagattgtagatacggtatttacccgcttcggcatccgtgtttgtatcaagattaacaaccgcaagatattgagtggcattgccgaaatcatcggtgagtctgacaagattgtggatattactgtggccatcgataagttggataagataggtctagataatgtcaatgccgagttgaaagagaaaggcatcagtgacgaggctatcgctaaactgcaacctatcattttgttgagcggaagtaatgaagagaaactcgcaactctgaaggaggtccttgctgccagcgagactggactgaaaggtgtggaggaaagtgaatttatcctttccactttgaagaatctcggcttaaagaatgaaatcgagttggacttgacattggctcgtggcttgaattactataccggcgccatcttcgaagtaaaggcgcttgatgtgcaaatcggcagtatcaccggtggaggacgttacgacaatttgacgggtgtattcggcatgtccggtgtcagtggtgtaggcatctcgttcggtgcagaccgcatctttgatgtgctgaatcagctcgacctttatccgaaagaagcagtgaatggtactcagctgttgtttatcaactttggtgagaaagaagctgcattctccatgaatgtacttgccggggttcgtgcggcaggtattcgtgccgagatttttcccgatgcaagcaagatgaagaagcagatggggtatgcgaactctaaagccattccgtttgtggctttggtaggggagaatgagatgaatgagggtaaggtgacattgaaaaacatggagaccggtgagcagaaaatggtcactccccaagagttggttagcgaactgaaataataaaaactgaaatacatttaaaaaggagcataaagttgctcctttttttgtatatttatggcacgaatataagtatttgtaatagtggcgtaggagaaatgaaacatcctgcatttatctttgtactgacaaaaaaggaggttcttatggtttctgttgagcttaagcaagaaaaacacaatgccctcgtcagtttcctgatgattgtcatagcggtattgttcctgctctatatgggcagttcattagtgcattctacaaaagcgttctgggaaaattattccatagaagagctgctggaatagaaggaattcaagtcaaatcactacctttgtcggcaaaacatactgccgatgatactttattttaccgcaaccggaaactcacactggattgcagaattgcttgcagaggctacgcatgatactgccgtcagcattgttgattgccttaagcaaggcctgatacccgcagagctgtcaaaagctgacagagtgggtattgtttttccggtgcactcatggtatgccccccgtgtcttgattgattttttgtcgcagctccggttgccggattgccgttatcgttatgccgtgtgtacatgcggggacgatgtgggaaagggaatgaaccgtctggcggagcattttccgttggatgctgcttggtctgttgcaatgcctaatacctacgtaccgatgttcgacttggacgatgaggcgctttgtcgtaagaagatagagaatgcacggcttgccattacttcaattgtggaggatgtcattgcacggaagaaggcttggaacgtgcatgaaggcggtgctgcctggctgaaaacgtatgtagtgaatcctttgtttgtacgtttcatcattggtagcaagggatttcatgtagatgaaggctgtatctcttgcggaatatgcagtaaatcttgtccggtaggtaatatccggttggtggatgggcgtccggtgtggggaaagcactgcattcattgtatggcttgtttgcatttttgcccccggaaagtgatacagtatggaaaagcgacacagaagaagggaagataccggttgggagattatctttgtcgctttaccactcccacataaatcagcagaataacattcattaccagtgcgtagataatggcaggtattgcaataatgtcattgttgaatacaaacgggctactggcaacggcaattgcctgtgcggcattttgcatgccgatttctataatgagtgtacgttgttcttttcggttgaggtacatggacttcgatagcagtacgccgcctcctatagccagcaggataagaacggagatgcagattcctagtttgccgaattggtcggtgatggtggaatggtgctgtatgaagaagatagtcgccagcaggataagtgcgggaaaagctatcttcgacaatgtcttatgaatcctttctgccatttgcggacggtaacgctttgtgagtataccggctacaatgggaaggagcatcagggccaggttctgtatgatgaggctgcctatagggagatggacgtctatgttcagattgttgtctacatagtgtgtggcgaattccataatcatggggatggtgaatagtgtgataatactgctgcatgccgtcagtgacacggacaatgctacgtctcctttagctatcatggagaagatgttggatgaactgccacctggcgagcaggctatgagcatgatgccgataaaaaacaaaggttcgagctggaagacatgtcctaaagcaaatgccagcgtcggcagtaggataatttgacctgccagtccggcaatgatggggcgggggcgtttgcggaacagtttaaagtcttcggtttgtaatgtcagtcccagttcaaacatcaataaggtaagaatggggaggactatccatattgcattcataagtcaaatcattttggaggctgcaaagatagcaaatcttgtttatactttgtcattttgtcagtctttgtctgccaaacaaacagcttgtcggtttggcacggttttcgtaagttgtttattgcttgtttaaagcgaaattactattataataaatgtataacatataaaacaaaaagactatgaacattaaaccattagcagacagagtgctgatactccctgcacctgcagaagaaaagacaattggcggtatcattattcctgatacagcgaaagagaaacctttgaaaggtgaagttattgcagtaggcaacggaacaaaagacgaagaaatggtgttgaaggttggtgacacagtgttgtatggcaagtatgctggtactgaactggaagttgaaggaaccaagtacctcatcatgcgtcaaagcgatgtgctcgctgttttgggataatttttaattagtaaaccgttaaatagtaaataaaattatggcaaaagaaatattattcaatatcgatgcccgcgaccaattgaagaaaggtatcgacacactggcaaatgcagtgaaagtaaccctcggccctaaaggtcgtaacgttatcatcgaaaagaaattcggtgctccccacatcacgaaagatggtgtaacggtagctaaagaagttgagttggcagacgcatatcagaataccggcgcacagctggtaaaggaagttgcttccaagaccggtgatgatgcaggtgatggtactacaaccgctactgttttggctcaggccatcgtcgccgaaggcttgaagaacgtgactgccggtgccagcccgatggatatcaaacgcggtatcgacaaggctgttgccaaagtggttgattctatcaaaggacaggcagagaaagtgggtgacaattatgacaagattgaacaagttgcttctgtttctgccaacaatgaccccgttatcggtaagctgattgcagacgctatgcgcaaagtttccaaagacggtgtcatcactatcgaagaggccaagggtactgatactactatcggtgtggttgaaggtatgcagttcgaccgtggctacctctctgcttacttcgttaccaacacggagaagatggagtgcgaaatggagaaaccgtacatcctgatttatgataaaaagatttccaacttgaaagacttcctgcctattcttgaaccggcagtacagaccggtcgtcctttgctggttattgcagaagatgtggatagcgaagcgctgacaactttggttgtaaaccgtctgcgttctcagttgaagatttgtgcagtgaaggctccgggcttcggtgaccgtcgcaaggaaatgttggaagatattgcagtgctgaccggtggtgttgtcatcagcgaggaaaaaggtctgaagctggaacaagctactatcgaaatgttgggtactgccgacaaggtaactgtttccaaggataatacaactattgtaaacggtgccggtgataaagaaaacatcaaggaacgttgcgagcaaatcaaggctcagattgtatctacgaaatctgattatgacaaggaaaaactgcaggaacgtctggccaagttgtctggcggtgtagctgttctttatgtaggtgctgcttctgaggttgaaatgaaggaaaagaaagaccgtgtagacgatgcgcttcgtgctacccgtgccgctatcgaagaaggtattgttccaggtggtggtgtagcctatatccgtgcattggatgctctggaaggctttaagggtgacaatgtagatgaaacaaccggtattgacatcatcaaacgtgctattgaagaaccgttgcgccagattgttgccaacgctggtaaagaaggtgctgttgttgtacagaaagtgcgtgaaggcaaggcagactttggttacaatgcccgtacagatgtttatgaaaacctgcatgcagctggtgtggtagatcctgccaaggttactcgtgtggctcttgagaatgccgcttctattgcaggcatgttcttgactacagaatgtgtaatcgtagagaagaaagaggataagcccgaaatgccgatgggtgctcccggaatgggcggcatgggtggaatgatgtaagacttttcccctgattgcttaatcaaatagaagaaccgcagtgtctttttgatagatactgcggtttttttgtttcattttccttcttgattatcaataaaaagagtgtaatattacaaaagtgttgcaaaaacggttcatttttatatcttttgttcgtttttgttgttagttaaataaaaaatcatatctttaccctttgtaaagataacctaatcaacaagagctattaacctttttaattaaagagaaaaatgaacaaaagcgaaattggactaaatgctgggaaagtttggcagttgcttagcgattataccagatggagctacgattctttaaagaggaagtccagactgaaggacaaggaattgggagccgcattggggtggcttgcccgtgaggacaagattgaaattcatcaggaagaagatgaactttatgtttcactaggggtaaatgtttatatcggataaagggaaccgagtgaatggattgattgaggggcacagatttcatagtgcggaagcattttctgccggggggatgaaatctgtgctcctttgttttttcatgttgcagaatattctttcctttgcacattcttttcaatgaacaaaaacagaatgactatgagaagttttgcttcagacaataattcaggcgtacatccgctggtaatggaggcgctgaaccgggccaaccgtgaccatgctattggttatggggatgatccttggacagaggaggctgtccgtaaaataagggaagcgtttacgccggattgcgaaccgttgttcgtattcaacggtacgggcagtaatgcggtggctttgcagctgtgtacccgcccttataattccattatttgtgcagagactgcacatatctatgtcgatgagtgcggtgcgcctgcccgtatgacaggttgtcagattcgtcctatagctacccctgacggcaagctgacgcccgatttagtccgtccttatttgtgccatttcggcgaacagcatcattcgcagcccggagccatctatatttcgcaatgttcggagctgggcactgtctataagccggacgagttgcgggctttgacggatttggcccatcggcatggcatgtatgtccatatggacggagcccgtctggcaaatgcttgtgcagccttgaatcttggctttagggaactgacagtggattgcgggatagatatcctcagtttcggtggtacgaaaaatggactgatgttgggagaaagcgtggttgtctttaacccagccttaaagaaggaagcttattttgtgcgcaagcagtcggcacagctcgcatccaagctccgctatctgtcctgccagttcactgcttacctgacggacagcctttggctgaaaaatgccgcgcatgccaatcgtatggcaaagattctttacgacggattgaaggagttgccaggtgtgcattttacgcagaaggtggaaagtaaccagcttttccttacgatgccccgtccggtgattgacgagctgttgaaggagtatttcttctacttctgggatgaggccatccacgaaatccgttttgtaacctcttttgatactacggaagaagatatcgagcaattgctgcaatcggtaaaaaggcttctctgaaatatataaaagctcctaaccttcacaggctgggagcttacttcgaaactttcccctcttgggggtaggggaaggtttactgaaaacaaaccgattgaatatttaccttaaatacctttgcacgataacttttttaactaaccttttcaataaatccttgttagagtatgcttatataccgatagcctcgcggaccggtacaaaagtatagccttttcgtttcagcgtcttaatcatcttgtccagatagccattatagaacttgtctgtgcggcggtcgtccgttccgaagtgtatcagcattaggtgtccgttcagaccttctttcttttccacctccataatcttgtcgtagatgaatttgctgctccggtacttctgtcccatgttcggagtggtgtagtcggcattgctcatggtaccaggggtatagttgatgacttgaatacccatattctttgcccaggcggatatttccttgttatagtattcgtaaggaggaatatagacgggagcgtctttgtattcgatacttgccttgcggagggtctcgtagcttttcatcatatcgttctcaaactcttcgcgggtgaccagcagagaatcacggttttcccaaggcatgtacaacagatgtccgtaactgtggctgcctacaaaatgcccttcgtcgagcaggcgtttcactacatcgggatagagttcatagaactctccggtaaagaagaagccacctttgatgccatgcttcttcaaggtgctgatgatggcatcggcaccgtctgctttgtcggcggcagtgaatacgagagtgatttgcttttttgagggatcggtgcggataatgcctccgtccacatatacattcttgtcatttgggataccggcttgcttcattccatccttctgcatggcagagaggtagtacgtgaggcaggcggttccgtccatggtaggctcattggtggaatagtcgtggatggcgtcgtgatataccatcaggtctggctggaagcgttcgtagtcttgtccgggagttccgggaattcccgtcatgttgacaccgcgcaggctttcgaagatggtacgatagacaggaccgtccaccagtccgccggtagtattgcccacgcctgcattcagcagtgaggagtggggttgcgagggatagtctccgtaaaggggaagttccacaatcatgctggttccccaagggttacagccgaacagccagtcgcgcagggaggcttccatttcggcgtatgtgtcatcgccggtggtttcacggtacagccggcattgggtcagcatggcggtagtcagattgttggaacaccagatgtagggtataccgtgcaggaaggggctttctaccgctttctcgtacgtgcgttcaatgcccgtacgcatgttgcggatgaattccttgctgatgcggctgttgtccactttggcaagatggtagtgccccatgttcatgaacggataccattggtagtggcgtgcactgtcggcgcccatccagggagtcaccggttcgcgacgtccgtattcaagggcttggaccaggtatttgttgtcaccggtggctttgtacagctccatggctcccagttccatatcgtccacccagttgtcctcttcgtaaatgtagggagacaagacagaggcagtctggcatactcccggtttcttgacgccttcctgataggcggcatcggccttggcttcgatttctgctgcaaattcaggatagtagtctttcaatatcttggcgcctaaagcgaagcaggaggcaaacttgccggcagtgcttgccactccggtcgttgcgttcttgaactctccacgtacttgcggttcgccactgcaaaagtaaacggggcgtcctttacccggtccgtagccgtaatccaccaggtctttgttaggtaggcgcattccggcatggtcacggtcatcggctatctggttgtacagctcgcccggagcaggattcatcctgttcagccagtccagtccccacttgatttcatccacgatgtcgggaatgccgttggctcccggatttccagctgtatcataggcgtcgccgaatgattccggattttcctgataggcaaacatcatctggtagatggcattggcggaagtggtggtgtattgcagatagtccgtagcatcgtgccagcctccgcggacgtctatatgttgtccggttttggtggggtgatagacgatgtagccgtcgtccacgtggcagctgtctttcaggaacggattatagccgcagcgttgctgccgcatgtagtgcagcatgtagtctgcggtaccgttgtagacttgtgcattgatggggaaacggggggagaccgctttgcctgctttcagataatacgtgcccggttctgtgaaatcactgaagttcaaccggtaggtacttttcatgcctcccatcttgccggtggctttggctgtgttgaaggtacgcaccacctttccggtgaaagcgtcaatcaatgaataatttcctacgtttgttccttcctcgctcatgaatacagcgactttgacggattgcggcaaatagccgagttggttgattctgatccattcgcctgctttgcccggcagggctacgagagcgaatattaccgttaggagccaataattacttttcataatgggggtttttaatctaaggttggggattatatataaaacaaattttccttattacaaataaagtattttctgtcaattttaggaagatttaggatgaataattagacgatattaggtgtcgtttacactattttggtgttttatagacgtgaaataagtgtttggttgaaactaaatgtttgtttatcacgtaattattatgcttgatgatgctttttaattttcgtttacctattttagtaatgcgtaaaacaaattggcgtgttatttgttttatggtatttagacaataaaactaatagactatggcttatattgattactatcaggtccttggagtggacaaaaaggcatctcaggatgacatcaagaaagcgttccgcaagttggcgcgcaagtaccatcctgacttgaatccgaacgatgctacggccaaggataagtttcaggctatcaacgaggcgaatgaggtgctgagtgatcctgaaaagagaaagaaatatgatgaatatggtgaacactggaaacatgccgacgagtttgaggcgcagaagcgggcacagcagcaagctgggggcttcgggggatttggcggtgccggttttggaggttccggtgcgggatttggtacggacggaggcggtacgtattggtattcttccgacggtcaggaattttcgggcagtaatgccggtggtttctcagacttcttcgaacagatgttcggtcatcgtacgcgcggcggaggcggtgccaatgccggtttccgcgggcaggattatcatgcggatttgaacctatcgcttcgtgaggctgcgaagacccataaacagatattgacggtgaatggtaagcaagtgcgtattaccattccggccggtgtggccaacggacaggtcatcaaactgaaaggctatggtggcgagggtatcaacggaggtcctgctggtgacttgtacatcacgtttgtgattccggacgactcggtattcaagcgtttgggagatgatttgtatgtggatgtgaccgtcgacctttatacagccctgctgggtggcgaccagttggtggatactttggatggtcaggtgaagctgaaggtgaaacccgaaactcagaacgggactaaggtacgtctgaagggcaagggcttccccatatataagaaggagggacagtttggcgatctcatcgtgacttattccgtgaagttgccgacgaatctgacggaacagcagaaagagatgttccgtaaaattaagggtatgaactaatgaaaggagaacggagtatgcagaacgaatggattgtcatcagcgaatattgtgacaagtgtcatatagagcccacttttattgatatgttgtgcgaaagtgggctgatagatgtggagcaggaaggtggagaacgttatcttcctttctccgagttgccggatgtggaacggtacagccgtatgtactacgacctttctatcaatatggaagggattgatgccatccatcatctgctggcaaggatggaagagatgcagcgggagatacactcgctgcgcggcaggctgaggctgcacggagagtattaattttcctttcgtctctttgagagcttttgtccctttaagaaggagcaagcaggaaatttttcagaaaaaacaagcgggcatcggagagtttagctactccggtgcccgctatatttgtcttgtcaagcaatgcgtttatttgcggtagctttccagctcttctgctttgaacttacggatgaagttaaagtgtttttccacttcggcttctgcatagttcacatacaccagagccgatttgccgaacagttcgggagcctttgttgcatcctggatgatgagatgcgacatgatacataccgcagccatctcatagaggcgacgtgccacgaagtccagcaattcctgattctgtgcctctttcaccgcattggtgcaggcttcgaacttgttggtcatctctttgatgcggtccatcaacggttgcatttcttcgctgcacggcacttgctcgtagtcgcgcaaggtggcagagtatgagccgtttgttacatagcggatagcagctacggtctgcaactgagtagtaccttcgtagatagaagtaatacgtgcatcacgatagatacgttggcaagcatactccagcatgaagcccgaaccgccgtgaatctgaatactgtcgtaagcattctgattggcatattcagagttcatacctttggccagcggagtgaaggcgtcggcaagtttggcatacttcttttgttcctggcgttcttccggagtcagtttacgttcgcgggcgatgtcgtccagcgctttgtagatgtccacgtagcgggaagtctggtacagcaaggaacgtcctgcatccaacttagctttcataatagccagcatgtcatatacagcagggaattcgatgatggccttgccgaactgcttgcggtctttggcataagccagaccttcgttgtaggcagcttgtgaaagacctactgactgtgcggcaatacccagacgggcaccgttcatcaaagccataacgtatttaatcaaaccaagcttgcggtcgccgcagagctctgcctttgcattcttgtaaaccagttcgcaggtgggagagccgtggatacccagcttgttctcgatgcggcgcacgtctacaccgccttcattcttgtcgtagatgaacatggacaagccacgtccgtctttcgttccttcttctgaacgtgccagtacgaggtggagattggcatcaccgttagtgatgaaacgcttcacaccgttcaggcgccagcagttgttggcctcgtcataggtcgctttcagcattacgctctgtaagtcggaaccggcatccggttctgtcaggtccatagacatggtttctccggcacagacacgtggtataaaacggctgtgctggtcttcgttaccgaattcgtagagcgtttcgatgcagtcttgcagtgaccagatgttaccgaaaccggcatcggcggcggcaacgatttccgcacacatggtgtacggagtaatcgggaagttcaagccaccgaaacggcgcggcatggtcataccgttcaagccagcttttaccatggcgtcgaggttctgcttagtgccgctggcatattccacgcggccgttggcacagtggggaccttcttcgtccacgccttcggcattgggagcaataatctctccggtaatctctccggtgatttcaagtaccttgtcaaaagagtccatagcgtccgcatagtcctgcggagcatagtcatacttgtctttgtcttggtaaccgcgttctttcagttcgcagatacgttccatcatcgagttgttcagatgatacttcaattcgggaacttcggtataaaaatttgccataatttcttggttatttaggtattctgaagtataggggcattgtgaatttcactcgcttggcctctccgtcctgatagccgggcgaccaacggtagacgtcggcaatggccttgaaagcacgtatggcttctttatcgatgtcatagcgcacggactggaggatttttggataggtcatcttgccttcttcgtctacaacaaactgcaggattacccttccttctgccttttgcttccaggcgtcttccggatatttggtaacattggccaccagtttcatgaggttctctattcctccggggaaggatggaaatacgaaatacggctgatgtgccatttcagttccgtgcttgtcgaacatctttccatcggtgcactgattctctgaatagtgttcctttctacgaagttttccatcgggatagtattgcaggagtgttccgtcaagtttcccatcactgtagctccgggccagatgtatggcaccgtcgggataatacaccatggtttgcccctccaagcgattgtctctatatacttctgtcaggctgtccttgccgtttgcatagaatgatgtatgcaagccttcccttatccttttgcggggattgcttttgtattcggagaaatgccagacatccttcttttgtccttccaaagcatactcttccaccttgatgcactttttgtttatcttggaaacaagagcatacctgactgcttggatggagtcgtccgtccattggtaattcttgtccaaccagagtttctcttgagcgatagcggaagatatacctgaaagaagaacaaatataagaatcagccctttcatgattacctttattgttatttactgtgtgatttataatattttatcatcttcgggataacctcttccaccgtaccgttgatgacgtagtcggcaatcgtattgatgggagcgttctcgtcattgttgatggagatgataataccactttcctgcataccggcaatgtgctggatttgtccgctgatgccgcaagcaatatacagtttggggcggacagtgacaccggtctggccaatctggcggtcatggtcggcataaccggcatcgacggcagcacggctggcgcctacctcagcatggagttctttggcaagctcgaacaacatgtcaaaaccttccttgcttcccatgccgtagcctccggcaatcacgatgggagcgcctttcaggttatgttttgccttttctacgtggcggtcgatgacttttaccacatagtccgtctcgggcacgtacttggcaacgtcgtggttgatgacttcgcccttatagtcagcgtccagtatctctttcttcatcacaccttcgcgaacggttgccatctgcgggcggtgttcgggattcacaatcgtggcaacgatgttaccgccgaatgcgggacggatttgatacagtaggttctcgtaggtcttaccttccttcttgtcttcgtggttgccgatttccagtgaggtacagtcggcggtcagtccgctggtcaaagcggaagaaacgcgcggaccgaggtcgcgaccgataacggtggcgcccatcagacagatttgcggcttttcttctttgaacaagttgatgaggacagaggagtggggaagggaagtataggggaacaagcccggagcgtcgaatacgtggagtttgtctactccgtagggtaatacttgcttttcaatgcctgccagattgcttccggcagcaactgcctccagttggcagcccaactgattggctaatttacgacctttggtcaagagttcgagactgacgtcggcaactgttgtgccttctatctctaaatatacaaatacattattcataatcttatcctatcgtatggttggctaacagttcaacaatcaaatcttccacatccttgtcgctgcccgtcagcgttttgctttctttggcttggaatgagatgttctgaatggtcttcaccttggtaggagagccgctcagaccgcattgtgcaaggtcgccgttcacgtcggcaacgctccattccgtgatgttcagatagggatatttctcgtagaggtcggcgtaggcaagctcagcgccttccttggtgatggcagctttttcctgggcaccgagggcgcgtttgtacttctgcaccagtttggcattgcgtgggcggcagggggcggcacttccgtttacggtgatgacgatgggcaggggagcctcaacggtttccacaccaccgtcgatatgacgtttcacggtaatcttcttggcagctttgtccacgttcagaatctcttctgcgtaggtcacttgcgtcagtcccagtttttcggcaacttgcggacctacttgggcggtatcaccgtcgatggcctggcgtccgccgatgatgacgtcatagtcgcctatcttcttgatggctgtggcaagggcatacgaagtggcaagtgtatcggcacctgcaaaagcgcggtcagtcagcagatagccgttgtcggcaccacggtaaagtccttcacgaataacttcggctgcacgtcccggtcccatggtcaggatggtaacggtggagcccggatgttcatctttcagtcggagagcctgttcaagagcgttcagatcctcggggttgaagatggcagggagtgccgcgcggttgatggttccgtcggctttcatggcatctttcccaacgttgcgtgtgtcgggaacttgttttgccaatacaacaattttcaaactcatgctattaattattagtattagtatttctttgtatgtcagtgccgggaataggagtagtagaatcctgctactgaaattggccggttaactcattatcagcctgcaaatttacggaaagagttgggtttgacaagaaaatggggtgaaaaatgcacaagttgagggattttgcgcaaatatcagtaggctctatatctgtaaaaaaggtaataaaaccggtaatttatctacctttccgttcccgtttcctctgtacttttgcagcgtccggatgaggcctgcacgacgggcggcatcggataaacaagtatcgctacttaaatgctattatagaatatgtatattgaaaaagtaaattcccctgctgacgtgaaaaagttatcagtcagcgaaatgaacggattgggtggagaaatccgccaggtgttgttaaacaagttgagctcccacggaggacacgtaggtcccaacctgggaatggtagaagccaccatagccctgcattacgtgttcgattcaccaacggacaagatagtttatgacgtgtcccatcaaagttatacccataagatattgacaggccgccgggcagcgtttatgaatgcggacgagtatgacgaagtctccggatattccgaaccgtcggaaagcgagcacgacttcttcgtcatcgggcatacctctacctccgtcagtctggcaagcgggcttgccaaggcgcgtgacttgaagggggagacgggtaatgtgattgccgtcatcggcgatggctcgctaagtggtggcgaagccttcgaaggattgaatgtaggtgccgaactgggcacgaacttcatcgtcattgtcaacgacaaccagatgtccattgccgagaatcatggcgggctataccgcaatctgcaacagttgcgcgaaacggagggtcaggctccctgcaactattttaaggcaatgggatatgattatctctatgtgaaggatggcaatgacgtggagcaattgatagaggctttccgtgaagtgaaggacaagaagcatccggttgtggtacatatcaataccttgaaaggtaagggatacaaattggcggaagagcagaaagaacgtttccattacagtgttccgttcgaccttgagaccggcaatctgaccggtgagcctgggaagggtgaagactatgccgaccttaccgccggttatctgttgcaggagatgaagaaagacccgactgtggtgggtatcaccgcaggtacacctacggtatttggctttacaccggagcgccgcaaagaggcagggcggcagttcattgatgtgggcattgccgaagagcaggctgttgccatggcttctgccattgctgccggaggtggaaaaccggtattcggggtttacagcacctttatccagcgcgcctacgaccagttgtcccaggatctttgcatcaacaataatcctgcactgattcttgtcttctggggaagcttgtcgagtatgaatgacgttacccatctttgtcttttcgatattccggttatcggcaatattccgaatatggtttatctggcacctacttgccgtgaggagtatatggcaatgctggagtggggcatccgtcagacggaacatccggttgccattcgcgtgccggccaatggggttgttcgcaggaatgtagaaccagagaaggattacggcaagacgctgaaccgttatgaggtgtcccatcgtggagagaaggtcgccatattgggactgggctctttctatcagttgggcgaagctgtggctgcccggttgaaggaagagaaaggaatggatgccacgcttgtcaatccccgctacatcacgggtgtggacgaggctttgctcgatgacctgaagctcgaccatacactggtcattactcttgaggacggagtgctggacggtggctttggcgagaagattgcccgttactacggtccgtcggatatgaaggtactgaactatggtgtgaagaaagagtttatcgaccgttacgatgtggaggaacagttgaagaagaaccggttgacggttccgcagattgtggaagatatctgtaggatttgttaagaattgaaaaaggagatgcagtttgatgcatctccttcttttatttatttaatacccagtttcttggcaatatccttaggcagtgcatccttgtgcacaatgatgttcattgttttatagcgcacgaaagctttggaagcataccacaaacctttgtactttccggcttcaccccaagagttctttaccatatagtattcgttgccttcctggtctttggctataccgtaaatcagcataccgtggtcgtcagtagtttcccagttgtcgtatgccagctggcgctcttcttgtgtgcaccacttctgcggttgaggcttgctgttcagtttcttttcttcgggtttcattttcagccagtgtgccatgtcagaaccgctcagttcttgcaccttttctgcatcgggcattacggctataccgtcgcgtgtgaagccttgttcgcttacgtcactaccccatgcaatggtgtaacccttattgatagcgttgtcaaacacttccatcaactcgtcgataggcaagttgtaggaagaagcccaacgccagttgtcttgtatttctaggacgaacggctggtagaagggatggtgggtataggaagtcagtgagatatagtcatctgcattcagtccggtagattcatagaaagacttcggagtatattccttgcctttgtaggtgaacttctcgggacgttcgcccagataaatatcgtggatagcggtaatggctttcttccagagcgggttcttgtcttggtctgtttgcaggctgcggtgttttcccttggcaatggctgccactacggcatcagatacggctgtcaattcggtgtggttgctcagcgtgtcgccatacataacgcccggacgcatttcctcttcgggcaccagaccgaaagttttcataccataaattacatcgtagaacgaaccgccttgtgagaacgaaacgtcaccatgtgtacgcactgccttgtcggcacggtccagataggtgttgtgtacgataaacatttcagaaaagtcgtattcgcctttgcccatgcggagcagttcggattcgatgaatgccaatccggaatagcaccagcatgtaccggcgcggttctggttcttaacagaagtgatcggattttcttttacggtcgtaaagatgaaaccttcctctttcagagtgtcttgtgctattgtgtttaaacttaataaacccaatgcagccatcagtattgatttcttcatcataattaaaatgttatagatttattgttgcaactgcaaatataggtagaatatcgtaaacaaaagctatctttgaagcgttaattccgacacttatggagaaaataatacatattgatgaccgtagcggtcttgttttggagggtggcggtatgcgcggcgtcttcacttgcggtgtgctcgacaactttatggatcgtggcattcgctttccctataccatcggcgtcagtgccggagcctgcaacggactttcctatatgtccggtcagcgcgggcgtgccaagtacagcaatatcgacttgttggaaaaatacaattacatcggattgaagtatctgttgaagaagcggaatatcatggatttcgacttgttgttccaggagtttccggaacacatacttccctacgactacgaggcatactttcattgccccgaacgctatgtgatggtaactaccaattgcgagacgggcgaagcgaactattttgaggagaagcggagtaaagagcgcgtcattgatattgtgcgtgcttcgagcagtctgccgtttgtctgtcccgttacctatgtggacaacaccccgatgctggatggaggtattgtggacagtatccctttgatgcgtgcccgtcaggatggatttaccaataatgtggtagtattgacgcgcaatcatggataccgtaaggaaattcagggaacgaaggttccaccttttatatataagaaatatccgctattgcgtgaagctatcaatcgccgcagcattgtctataatcaacagttggagcaggtggaacggatggaagccgccggggaaattattgttatccgtccacagaagccggtagtggtagaccgcatcgagcgtgacatcaagaagctgacggagctttatgaagaaggataccggtgtgcggaacagtttgtttttcgtttttgattctgagagagtatactatgagagctggtacaattagcatctgctcccatattgttttcattcttttctattaatttgctgctaaagctaaagtttatttagcaaaaaacacgcgtagaatacctttagaaaggggatgtatcaaaaataccacctttcgtaacatttgttataggtgcaaattctggtttcgcttaattttgctgacacaaaactcaattgcagaattggtttattattaactttaaattgatagatatgttgaaaagcattagtctcaggctttgcacactaattgtgcttctctttgcgggcatctcttcctttgcccagcaagtccaggtaaaaggtactgtcgttgaaaaatcgagtggtgaatccattatcggtgcttctgtcatggaagtaggttccaacagtaatggaacaattacggatattgacggaaatttcactctgtctgtagcttccggtgccacattgtctgtatcctatataggatataaaaccgttacagtaaaggcacagcccattttacgcattgagttgacggaagattcccagttgattgatgaagtagtagtgaccggctatatgtccgagaagaaggccagtttgactggttcggtagctgtggtcaagatgaaggatgtagcagatattcctacgggaaatgtgttgtcgagcttgcagggacgtgttgccggtatgaacattacgactgacggcacaccgggcggtggaaatacttctacattggtccgtggtaagtcatctttccgaaatgatgccaattccccgctttatgtcattgacggtgtgatgacccgtgagaacatctcgtctatcctttcttccaatgatgtagaatccattcaggtattgaaggatgccgcttccgcttctatttatggtgcacaggctgccaatggtgtgattatcattactaccaaacgtgccaagaaaggggagacccgtgtggattttgatatgtcgttgactttgcagacctatcaatgtggctttgatatgttgaatgcagatgagtggggccaggtttattggtcggcttataagtatgccaataatggagctacgccaagcagcgaaatatatggtaatggtgcaactccccaacttcaagactatatcggcctgaatggagctaaagtacatgccgttgatacggattggcgcgatgtggtttatcgcactgccttgatgcagaattatagtgcgacactttcaaagggctctgacaatggtgccttctcgttagcgttgaactatctcgaccatgacggtctggtagagaatacgaatttccagcgtatcaatacccgcatcagttctaactatcattatcttgacaatcgcttgcgcatcggcgagaacgttgccatcaatcgttggacacaaaccctcagtccggccggtgtagatgagaatgccatcaaacagcatcctgccaagacggtttatgatgagaatggcaattataacgatgccatcaatgatgttttgggtgatgcccccaatatggcacgtttgttggagaatgaaaaacagaacaaacatgattactggcgtatctttggtaatgcattccttgaaattgaaccgattaagaacctggtgctgaaaaccaatttcggtatgaattattatgatgaaaccaacaaaacttttgagccggcatgggcacgtgatgaggtcaataagctgactcaatcatccaacaaaagactggattgggtatggaccaataccgtgacttatagcaaagcttttggaaagaacaatctgactgcacttcttggtacagaagccaagaagaaccattcggaatccatgttcggttatggtacgggactggctgtagaagatgaagattatatttatctcgacggtgtgactgccggtaagaatgtaggtgccggtgcttccaattatggcatggtgtcttactttggtaaagtgaactatgattatgaaggacggtatttggcctctgttacggtgcgccgtgatgcttcttcccgcttggcaaagggtaataatgtggattacttcccttcagtgtcggcaggctggcgcatttcaagtgagaagtttatggaagcgaccaagaattggttggcagatttgaaactacgtgcttcatggggtatcaatggtaacgatattattgataatgaggccccctatactaaatacttgattagtctgaaggatgcaagctacaacatgaacggtgatggaacgactttggcccccggtggctacaaagtgaggtctaccaatcctgatttgaagtgggagagtacaagacaactcaatatcggtgtggacgccgctttcttgaacggacgcctgagcgcttctctcgattattttgataagaagacaagtgatatgcttgtggagaaaccgtatattgctgtcattggcgagggtggttactgctggtataatggtggtacgatgaacaataaaggtttcgagatggcactgacctggaatgataaggtaaaagatttccagtataatgtagcattcaacctttcatattacaaaaatgaagtgacagagctgacggaagaaatttactatacttatggtggcggtaatggggttgacaagactttggttggccaaccgttcggttcatggatgggcttcaagacagatggagtgttccgtacccagcaggaggtggatgagtataaatccaaatataatgtacagtttggcgctcccggagtaggacgtatcaaatacgtggatgctgacgataacggtacgattgatacgaacgaccgtgtatggttgggttctgacaatccgaaagtgattgcaggtctgaatcttggggcatcttggaaaggctttgacctcagcatgttcttcaacggtatgattcgtgatgcctataacaactccaaatattatacggatttattccaatgctggaccggtaatcactctacccgcctgctcgatgccatgcatgcttacgagaactttgaaaagacgggtgtttacaatagcagtgtacctgctttgaccactcttaacagcaacaatgagcacgaagtatctgagttctatattgaaaatggttcgtatatcaagctgaaaagtctgacattgggttacacgcttcctaaagcagttctcgataagatgaagatgcgtcatgcgcgcatttatttccaggctcagaatttgtttacgattaccggttatacaggtgccgaccctgaaggtctgggttatccttatccgttgccccgtacgttctctttgggattatcatttggtttctaaactttaaaactatactatcatgaaattgaaacatttatatatgcttggcgtagtagcgctgatgactgcaagctgtaatgaagaccgtttcctggatttgaagccccagggtagcttgaatgaagatattatgacttctacagaaggtgccgaccttttggtgaatgccgcgtatgcagctttgggtggtcccgaaggacagagctggagtgtatggtgtcatcctacttccaattggacctatggtgaggtacgttcggataatgcctataaaggcggtggtggtgttggtgaccttaatgaagtgcaccgtatggagacatttgatatggatgcaaccaatggatttctggacagcaagtggtaccatctatattgcagtgtacagcgttgtaactctgcattgcgcgttctgaatgctgcaacagatgagcaggtgaacggacgtgtatcccgtattgcggagatgaaagtgcttcgtgcccattattactttgaattgagccgccttttcaacaagataccttattttgatgagaacgttgagatttcccaatatccggatattccgaacaatgagtttacccgtgacgagattctgagtatgctggccaaggagatgcttgatgccgccgaactgcttcctgcatcacagtcggaggtagggcgtattcataaatatatagcactggcctatgcggctaaaatcaagctgtaccaagcgtatcagcaagatgagactacgcatgccgtaacttccatcaataaagagctgctgagggaagtcgtttcgctttgcgaccaagtgactgccagcaaccgttacggtttgcttgacgatttccagggattggatttagtagctaatgaaaacggtaaagagtctgtttttgccattcaatattccatgaatgacggtaccgaaagtgccggccgcatcaattggagcaatctgttgaattctccgggtggaggcagcccttacggaggtgacggtttcttcctgcccagccaagacctgattaatgcttatcagacagatgcaaacggtctgcccgattttaattatcagtcaaagtctgattatagttgggcggtattgaacaatggggtttatactttacaaaacacgactcccaatgtagacccgcgtctcgattttgttgtgggccgtcctactataacttggaaaacttacccggacaaaccatgtgaaggatgggtgcgtgataaggaaacttatggctataattgcgcgaagcgcttctgggtttctccggaaagtagtgatatgtttaatggctggccttggggggcttcacagttgaactggcagattatacgttacgcggatattcttctttggaaagctgaggctcttattgaactcaatgaaggcaatggactcgaaactgcccgtgatttgattaatcagatacgcaatcgtgcccggaacagcgcctatgtaaaggatttcaacgaccattccaactatgcggccaactaccttgtcaatccttatcctgctgatgtctggaatcaggattatgcccgtcaggccctccgttgggaaacacgtctggagaaggctttggaaggtgaacgtttcttcgacctggtccgttggggcatagtggaaacaaccatgaacaagtacatcgctgcggagtcagacaatcgcatttattatgccaatgcgcactttacgggtggaaaggatgagtattatccggttccgaacaatcaatacggattttctggaggcaagtatgtacagaatcccggttatgctccgttcaactaattatattttgaaataaaaacggaagggaggggaaacaaacgtttccccctcttcctttaaacaatcttttattatgaaacactttgcctattctatattgggctgtctattgctttctttgaatgcagcttttgctcaaaaaacatggtcgtttgatgggcaggaccccttactctccagtgacggcaagtcattgttgaatttgtacactataaaggaaatactggaatttgttaccggagtcgaaggtaaagcccttcgtacagacgggtattccacttggatggatacaaccacggaaggagatgtttcgtcgttgtccggatggtttgctctggaatcttatccgacggatactgctgcctttatgggaatcagagacatggcaggaacatctgtagcggtatgtgtagaccgttatggtgagctgctgttgggaatggggcagaatggctcatactcttactgttcattaaagacaaaagtcgaccgtttcaagtggctgcatgtagtccttgatttgaataatgaatcggtttgcctgaatgggcagaggatgagtgtagaggtatggccccggaacttgcaagatggtgaaatgatgcttcgggtaggtaaggatttcagggaaaagaaggtttggatgtacgatgttacggctataaacgggttgattgacgggataagcctcactcccttttccgatgattcgtctgcatggagagacgagattgccttaggattgaagaagactccggttttggctattccggaaacccgttttgcgaaggacttcaaccgtccccgctatcatctgttaccggctgccaactggacgaatgagacgcatggtttacttctttataaaggtaaatatcatatattcaatcagaagaatgcttctgcaatcttcctgggacagataaattggggacatttcagcagtcccgatatgcttcattggacggaggaaaagccggctttgactcctgatgctgcttatgacaagaatggaatatggtccgggcatgctgttatcaatgatgacggtatcccccagctgatatacacagccggtggagacaagatgggagtgggtattgcttttccaaaagatactgcgttgatagaatgggagaaatatgcgggtaatccggttattgccgagaagcctgccggatatacccgtacggacatgcgtgaccagtatgtctggaaagagggtgatgtctggtatatgattatcggtttcggcattgagcagaccgatacaccccacggggctttgctgctttataaatcggcggacttgaagagatgggattttgtacatttgctgtttgagggcaatccggaagtggatgactccggtattttctgggaaatgccggtctttaagaagatgggcggcaagtatgttcttttggtgaatagggttcctcataaaggcatacctgcgcgttgccagtattggataggagatttcaagaatgaaaagtttataccggacaacccagtccctcaaaatctggaggtcatcaaccgcttgctgtccccctctgttgttgagactccggaaggggatgttgctgccattgccattatacccgatgaaataggaggggaggccacttatgaacaaggatgggcacatctctacagtatgcccagaagatggcagctgaaagatgggaaactatgccaaataccccatcccgtgatgaaacaattgcgtgaacaatccacggtttattccagaaaggcattgactgctgcgaaaccgcgcattgtgagcagaagggaacatcagcttgaagtcaaggcgactttttatcccggtgacgcaaaacggtttggatttacattgtgtaagaatccggataatagcgaatatagcctgatttattatgatgtggaaaaggaggaacttattgtggaccagacgcattcttccttgcgtgcacacattcctttgaagctccgcagggatcggtatcggttggatacaaccaagccggtggagattcgtctgtttatagacggttctgtggtggaaggatttattaatgatgaggatgcattcaccacaagaatctttcctctgaaagaaaacagtacgctattggaactattctctgacggaaatacaacggaagttgctgccgaagtttggagactgaaagatgcaagggtaaagatgaacttttaatgaaaatacagaaaatgaagataccgactatattgggtgcacttttagtggcaggaacattgtctgccggtgcacaaatgaattcagacagtttatacaaagagccttatcgtcctcagtatcatttcagtccggagaagggatggattggtgacccctcgggattcatgtactatcagggtaaatatcatatgtactggtggggcaaagtcgaatctacagatttggtacattaccaacagataaccccttatgccatgaccggagcggatgacaatatcagttacttcaccggttctgcagtcgtagacaagaacaacactgccggtttcggcaaaggtgcttatgtggcggcttacaccgtttttgagaaggactccaagaaacaagcgcagggcatctctttcagtcatgacggaaagacatttcattattacgaaggtaacccggttctggacctttggagtacggaatttagggaccctaccgtcttctggcacgagccgactcaaaaatgggtgatggttgtagccaaggccctggagaagaaaatcaagttttatacctctcctgatttgaaaaactggacttggaccagtgatttcggccctgccggtgacagtgaaaagtcttgggagtgcccggatttattccagttgtcggttgacggggattctgacaagaaaaagtgggtgatggtcgtatctgtaaactgggcgcaagaacaatactttataggagacttcgacggcacttcttttaagctgatggataaccatcctgcagagcctctatatgtggacaaagggctggacttttatgcatcccgtacatttcaggattttgacggaacgttggattccaaaatttcgatgggctgggttgcaacctgggactatgcaccggtagctccatcgaagtatgggaagggcttttggtccattccccgcaacctggaactgaagacatacaaggaaggcgtgaggctggtgcagaagccggtggaacagttgcaaacacttcgccataagcctgcatcggtgaaacgtgctttatcggtggggacacagaggttacccggctttgttcccgatgagaatgtctacgaactcgatgcttcgttttctactgacgtatccaacacctttggcttgaatttgtgtgtgggtgaagggcgcaaagtggtggtcagctatgatacggattcacataatctggtgattgaccgtacccattgctccgatgtgcagattcctaaattcagccgtatggcatatgccagggtggaaccggtagataataagatacatttgcatatatttgtagacaaatcgagtattgaaatctttgccaatgacgggaaggatgtattcacattattaacctatccgggcgaggctcaaaccggtatcgaactttttgcgcagaagaaggggacgaaaatggagttggatgcctggatgcttaaatcaatatggagatgaggaatttaatttgtgttattttagactgaatgtaacatttgtagtatgctttgaaacaaaaaagatagtctcctgctgcttggtggcgtatctttgcatggtagaaaaacataattaatttaataccaacagaaacatgattcatttaaaagacttttggcggacaatcagaagaacgcttaccgtatttatattaggaactaccgtggctgtcttcacatgccaggccataaatcctcctttcgtgattaaacatctgggtgacggacagagtatcgtccaaattgacgagcagaagaagtttttgctgctgccggtggaagaggcttctccggaggcaaaattgtatatgatagcagacaatgatgttgtacgcagtatgaacgtgcgattggcagtcaataaggttgactattttgttccggtcgatttgactggcttcgataataaacatctctctttcaacttccagcttattccggattcggccttatgctgggaagaaatgaaactgtcggatgaattcgatgtttcgaaccgggagaagttccgtccggtgtatcatttcagcccggcttacggttggatgaatgatcctaacggaatgttctacaaagacggggtttaccatttgttctaccagcataatccctacggctccatgtgggggaacatgcattggggacatgccaccagtacggacctcgtcacttgggagcatcacggagatgccatttcgcccgatgcgctgggaacaatattcagtggctcttgtgttgtcgacaaggataatacggccgggttcggtgccggtgccgtcattgccttctatacatcggcaagcgaccgtcaagtgcagagcatggcctatagccttgacaacggaaaaaccttcaagaagtatgcgcgaaatcccatcctgacttccacgcagcgcgacttccgtgaccctaaagtcatctggcacgaagataccaagaaatggattatggttcttgccgtagggcaggaaatggagatatactcttctgccgacctgaagaactggacgctggagagcaaattcggtgaaggacaaggtgctcacggcggagtctgggagtgtcccgacctgcttgaactgccggttgaaggtacggaactgaagaagtgggtactcgtctgtaacctcaatccgggcggaccgttcggtggctctgccacacaatatttcgtagggacatttgacggtaagaaattcgtgaacgagtctcccgcagtgacgaaatggatggactggggaaaagaccattatgcaactgtcacttggagcaatgcccctgcaggacgtgccattgcattggcatggatgagcaactggcaatatgccaatgatgtgcccacccgtcaataccgtagtgccaactccgtgccgcgtgacctttcgctctatacctcggagggtgaaacctatgtaaaggtaaccccgtctcccgaattgctgaaactgagggataaaggcagcaagaagcgtgctttcaaggtagaccgcacgtataatctggacaaactgctgaatgacaattccggaacgtatgaaatcgaaatgactattaagaacaaggatgcggatgtgataggattccagctctttaactcgaaaggcgaggaggtggagatgtactacaacttggcggaaaagacgttcaccatggatcgtaccaagagtggcgaggtgacatttagcaaggactttcctgcagtgaccgtggctcctgtcgagggtggcaatgaaatgaaactccgcttgttcgtagacaagtcgagcattgaagcgtttggcaacgacggacgttttgccatgacaaatcttgtattcccgtcggaaccttacaaccgcatcagtttctatgctaaaggtggaagctgcaatgtcacctcgtttactgtgtacaaactcggattaaaataacagataataatcttcagcatggaaaatactaagaattcttctttggcaaagctctttccggtcatgctttgcttcttcgccatgggctttgtggatttggtgggcatcgcctccaactacgtgaaggccgacttgaacctgaccgactcgcaagccaacatattcccgtctctggtgttcttctggttcctcatcttctccgtacctacgggtatgctgatgaaccgcatcggacgcaagaagacggtgcttctcagcctggtcatcacgtttgcctctttacttctcccggttttcggagacggctacgtgctaatgctgctttcgttctcattgctgggcatcggtaatgcgctgatgcaaacgtcgctcaacccgctgctttccaacatcgtaagcggcgagcggctggcaagttcgctcaccttcggacagtttgtaaaagccattgcttcgtttctggctccatacattgccatgtggggagctacgcaggccattccgtctctgggcatgggttggagagtactgtttccggtctatatggtcattgcggtgattgccattctctggctgggcggtacttccatccgcgaggaaaaggaagaggggcgtccttccaccttcggggagtgcctcgccctgctgggcaagccgtttatctttctctgcttcttgggcatcatgtgccatgtgggcattgatgtaggtacgaataccacagcgcccaaaattctgatggagcgtctgggcatgacgctggccgatgctggctttgccaccagcctttacttcatcttccgcacggcgggttgctttctcggagccttcattcttcagaagatgactccccgaaccttcttcggcatcagcgtgttatgtatgttggcggcgatggtagggttgttcgttttccatgaaaagacaatgatatacatttgcattgcccttatcggtttcggcaattcgaacatctttccggttatcttctcccaagcgttgcttgctatgccacaaaagaagaacgaggtttccggcttgatgattatggggctcttcggcggtacggtatttccgatagcaatgggcttggcaagtgatgctgtaggacaaagcggtgccgtggctgtgatgacggtaggggtagtgtacttgttcttctatatgctgcgtatgaagcggtaatctttgttcgcaggctgcggatacatatcccaaggctgcggatatctgtcccaaggttgcggatgtctatcccaagccttgggatagagataatccttagttcttagaaactttttaatagataattggcaacttttcattctatagttaggaacttttttattaggtttgcagcgggtaggacattgagtttgccgtgaataaaatatatcattcattaaacaatataatattatgaataagataatagtaggtatgggcgaggctttgtgggactgcctccccgaaggaaagaagataggcggtgctccggcaaactttgcttaccatgcatcgcagtttggtttcgacagccgtgtggtcagtgccgtaggtgccgatgcggatggggacgagattctggatgtgttcgcccggaagaggctgcgcacccagatagagcgcgtgccttaccccacgggaacggtgcaggtgacgctcgatgccgtgggcgtgccgtgctatgagataaaggaaggcgtggcctgggacaacatcccctttaccgacgaactgaagcgtctggcactgaacacgcgtgccgtatgtttcggctctttggcgcaacgcagcgaaacaagccgcatcaccatcaaccgctttctcgacacgatgcccgatgcggagggacaactgaagatattcgacatcaatctccgccagggtttctataccaaagagatactctgcgaatccatgcgccgctgcaacatcctcaagataaacgatgaggaactggtgaccatcagccgtattttcggctacccgggcatcgacttgcaggacaaatgctggattctgctggccaagtataatctgaagatgcttatcttgacttgtggaacgaacggcagctatgtgttcactccgggagtggtttctttccaggagacgcccaaggtaccggtggcggataccgttggagccggtgactcgttcacggcagccttcaccgctgccattctcagcgggaagcaggtgcccgatgcccataaactggcggtggaagtctctgcctatgtatgtacccagagcggtgccatgccggaattgccggacgccttgaaagaaaggctggcatagatttttcttattcttttcacatttttcgctatctttgctcatctgcaatcttaaatcagaggaaagtgaagatgagacaacataaccttcggattttattctttttgctcgtgctttggggagtggcggttgcctgctcccggcgcgaggcacgtttccgtatcggcgtttcccaatgtagcgaggatgaatggcggcaccagatgaacagtgagatactccgtgaagcccatttctacgaagatgtggaggtggacatccgtactgccgtcgacgataatgaccgtcaggcaaaagacattcgtgaactgatagccgaaggggtagacctgctgattgtggcccctaatgaagccactccgataactccggttgtggaggaggcatacaaccggggcattccggtgattgtagtggaccgtaaaatcctttcggacaaatatacggcctacgtcggtgcagacaactacgagatagggaaagctgtgggagagtatgtggccaatgtgctgcacgggcagggagatgtggtggaaatctccggtttggtgggttccacacctgccgtagaccgtcatcagggatttgtgaaggctatatccgcttatcccggtatccggttgctggtcactgaagacggtgcctggttgcaactcaaggccggagagaaaatggatactctgctgagccgctttccgcatatcgacctggtgtatgcgcagaatgaccgtatggcggccggagcctatgctgccgctgcccgcaaggggcgggagaaggaaatgcggttcatcggcatagacgccctgcccggcaaagactatggagtggagaaagtgcttgccggcgaactggatgccacgtttatatatcctaccggtggcgatcgcgtgatgcagattgccatggatattctgaacaagcgtgatttcccccgtgaaactatcctgggcacttccgtcgtcgaccgcgacaatgctctcatcatgaagatgcagaccgcccacatcggcaccctggatggaaagatagaaaccctgaacggaaagataaaccagtatttggccagttatgccacgcagcaggttgtcttgtacggcagtctgtctgccctattgttgctggtcggcttgttggtggctgtctacctctccttgcgtgccaagaaccggttgaaccgtgagctgtccatgcagaaaaagaaattggaggaacagaaaacccagttgatacagcagaaggaactgttggaagtacagaagtcgcagttggaacagctttcccatgaactggaggaggctacgcatgccaagctggtgttcttcacgaatatttcgcacgatttccgtactccgctgacgctgatagccgatcccatagagcagcttcttgccaaccgcaccctcgacggacagccgcgccagctcctcgagctgatgaaaaagaatgtgcatatcctgcttcgcctggttaaccagatacttgatttccggaaggtggagaacgggcgcatggagctccatctcgaaccttttgatttgcttgacagcttccggggctggaacgactctttccgcatggcgttgctgaagaaacatattgctttcagctttgaggcatctcccgatacggacttccggatgatggcggatgcggagaagatggaacgcatttacttcaatctcttctccaatgccgtgaagtatacgccggagaatgggaaaatcaccgtacggttgttaaagtcggaacagaactacagtctgtccgtcttcaattccggcagttacatttcttcgaccgatgtggaagccatcttcgagcgcttctatcaagtggacgggcatcaggcaggtaccggtatcggactggcgctggtacgtgcctttgtagagatgcatggcggtaacattacggcacgcagtgacgagaaaggcactactttcaccgtcactttcccgcagcaggatgtttcgcagtaccatcccaccatagtgacgttgcctgccgaagagcaggacgtgtcgtccaccttgatagatacggaagtgaaagcaggcgaagaggtggttgaggccgattgtcctactgtgctggtaattgacgataatgcggatatccgcagctatgtgaagtcgctgttatcgaacgaattccgtgtattggatgcggcggacggggcagagggtatcaggctggccatgaggtatgtgccggatgtgattatctcggatgtaatgatgcccggtatggatggtgtggaatgttgccgccgtttgaagagcgagttgcagacatgccatatcccggtgattctgctgacggcctgctcgctggacgaacagcgtatccagggctatgatggcggtgccgattcttatatttccaaaccattcaattcgcagttgctcttgtctcgtgtccgcaatctcattgcaaaccgccgtcagttgaggcagttcttcggagataaccagactattgagaaggaaaccatcagtgatttggataagggtttcgtctcccgcttcaaatcgcttgtcgaggagaggatgaaagatgcggaactcaatgtggaggatttgggacggaatatgggtatgagccgtgtgcagctttaccgtaagctgaaatcgctgaccaactattcgccgaatgagctgctgcgccagatgaggttgaaaaaggctgcctcactgcttgcctcctctgatatgacagtagcggagattgcttatgaagtgggcttttcgtcaccttcctatttcacaaaatgctataaggaacagtttggggagagtcctaccgagtttctgaaaagaaggggataactattgcctatccccttgttcttaatacacgtttgtttacttctgtttgatgataccggaacttatttcagtatttggggcaggttttctcttccccagaagtagtaaacacagattccaatccagcttgtgagcaggatgatgattgcgaccaagagcttctttactccgtctaccggccatctcatgatttcgagtacagccttgactgcaaggaccaccccaataacccaaataataaatccgatcataactttttgatatttaatgtttttatttaaaacaaatagaggctgcatccagttcgggaacagcctctattttctatttagtaattaaggaattactctgtaacttcagcgccccagttttctttggaaagacgcttgtagctgttgtagcgccatttagcgttttcttcggcggccttgaacagctcttcggcttcctgcggatattgcttcattacggatgcgtaacgaacttcacccttcaggaagtcttggaatccgctccaatccggttccttgctatccagcgtgaacggattcttgccttcggcttccaaagccgggttgtaacgccacaagtgccagtaaccgcacttaacggccttttcctcttctgcctggctcttgcccatgcctgccttcagaccgtgattgatacacggagcgtaagcgatgatgagtgacgggccgggatatgcttctgcctcgcggatagccttcaaggtttgagcctggtcggcacccatagcgatttgagcaacatatacataaccgtaagtagtagccatcagaccgaggtctttcttacgtacgcgtttaccggcagcggcaaacttggcgatggcgcctaccggagtagccttggaagactgaccacctgtattggagtaaacctcagtatccagtacgaggatgttgacgtccttaccgcttgcaattacatggtcgagaccaccgtaaccgatgtcgtaagaggcaccgtcaccaccgataatccactggctgcgtttaaccaggtattgagacagaccggcgatagtcttgcagctgtcgcatttgtctttggctgcttctaccatcgggatgatcttttcggccagttccttggtcttgtctgcatcgtacatgttttcaatccaagcctggaatacttctttgtattcagccggagttccttctgctgcgatggcatcttccatagccttcacgatacgtgcgcgcatcttttcgttggcaagctccatacccaaaccgaattcgcagaagtcctcgaacaatgagtttgcccaagcaggaccgtgacccttttcgttcttagtataaggagtagaaggtactgaaccggagtagatggaagaacatcctgttgcgttggctaccatttcgcggtcaccgaacaactgggaaatcagtttaacgtacggagtttcaccacaaccggagcaagcgcctgagaactcgaacaacggagtagcgaactgggagttcttcacgttggccttgatgtcaaccaagtgttgtttgcttttcacgttttcagcacagtaggtccagttagcagcttccggcaattggctttcgaggtgtttcatagtcagagccttgccacccttcttcgggttgcccggacaaacatcggcacagttgccgcaacccagacagtcgagaacgtctacttgaatacggaatgtcataccgtcgaatgctttacctacagccttcagttgagtgaagttggcacccttctgctcttcagcatcgagtacgaacggacggatggaagcgtgaggacaaacgtatgcacacttgttacactggatacagttttcagcgttccattcgggaacgaatgcagctacaccacgtttctcatatttggcagtaccttgttcccaagtaccgtcttcaatacccttgaatgcagataccggcaataagtcaccgtcttgtgcgttgataggacgaaccacttcgttgatgaatgcaggatcgttgttttcagccttggcgtcgtctgccaaattggcccaagccgggtcaacggtcagttgcttgtattcgccgccacggtcaactgctgcgtagttcttgttgacaacgtcttcacccttcttgccgtaagacttaacgatgaacttcttcatctgttctacagccaggtcaaccggaataacgccggtgatacggaagaatgcggattgcaggatggtgttggtacggttgcccaaaccgatttcttgtgcaatctgagtagcgttgatatagtaaacagtgatattgttctgtgcaaagtacttcttcaccttgttaggcaggttcttggccagctcttcgccttcccagatggtgttcagcaagaaagagccgttcttacgcaagccgcgggttacgtcgtacatgtgcaggtaagcctgaacgtggcaagccacgaagttaggcgtgtttaccaggtatgtagagcggataggagtatcaccgaaacgcaggtgtgagcaggtgaaaccgcctgatttcttggagtcgtaagagaaataagcctggcagtgcttgtcggtattgtcaccgataatcttcacagagttcttgttggcacctactgtaccgtcagcgcccaaaccgtagaatttggcttcgaacatgccttcgccgcccaatgcgatttcttcttcctggggcagagaagtgaaggtaacgtcatctacgataccgatagtgaagtggttcttcggcatcggcatagccaggttcttgtaaacggcgaggatttgcgcgggagtagtgtccttggatcccaaaccgtaacggccgcctacgataaccggagcattctctgcaccgtagaagcagtcttttacgtcgaggtacaacggttcgccgttagcacccggttctttcgtacggtccagtacggcaatcttcttggctgtcttgggaacggcggcaaggaagtgcttggcagagaacggacgatacaagtggatggcaaccaaacctaccttttcgccattggcaacgaggtggtcgatagcttcgcgggcagcttctgttacagaacccatggcgatgataacgcgttctgcatcttctgcaccatagtaatcgaacaaaccgtacttgcggcctgtgattttggaaatctcgttcatgtattcctcaacgatagccggaactgcttcatagtagttgttgcaagattcacggtgttggaagaagtggtcaggattttcggccataccacgggcaaccgggttcatcgggttcaatgcacgtgcgcggaattcagccaaagcttcctggtcgataagcggagcgaggtcttcgttctccagcatttcaatcttctggatttcgtgagaagtacggaaaccgtcgaagaagttgacaaacggaacacggctcttgatagtagccaagtgagctacaccggccaagtccataacttcctgtacagagccttcggccaacatggcaaaaccggtctgacgggtagacattacgtcctggtggtcaccgaagatacacagtgcatggcttgccaatgtacgtgctgatacgtggaatacacaaggcaggaattcaccggcaatcttgtacatgttagggatcatcagcaacagaccttgtgaagctgtgtaagtggtagtcagcgcaccggcttgcagagagccgtgaacggcacctgcagcaccgccttctgactgcatttcctgtaccaatactgtttcgccgaagatgttcttgcgacctgcggcagcccattcgtctacgtattcagccatcgtagaagagggggtgatggggtagatggcagctacttcggagaacatatacgagatatgtgcagcagcctggttaccatcacaagtaatgaatttcttctgtttagtcataactaaattgaattatttatttaagtgaaaaaatctctctcttaatacaagaaaccgaataaccagagaggtatttggttgcctcggcctatttccgccttatgcagtacataagtaactcccggattattctttatctttgttccttccggacaaatcttgaaaggcatcacctcatctaccatgaatgagatgttcttgtcgcccttgttcactttgtggtccttccacattgtgttggcaaagaaagtgtccaatacgtcttgttcttccaccttgacgggatagatggaatacatcagatttgaattgtgcatcattatcttcgacggcttcttggggaattcttctcccttaggatagaccatattgatgagccgtgcgtctgccagatacttgatgtaattcattactgtggcgcgggaggtctgtatgtcgtttgccagttggctgacattcggcgctttcggcccgtccacggccaacaaatatagtaatttctttatcttcgaaaggtatttcagctcaatttgtttgataagcaggatgtctacttccaccatcatgttcatcgtcttgagcagattctccgaaaagttacgcttttcaaggaagaatgggtagaagccgtggtgcatatagtcttgcatgtagtccaatggacgtactttggagaggatgcctttggctatctgttcgtggttgctcagaatttcttccagcggataggcatggaacttcatgcccgtctgcaagttcaggtattcgcgaaaggagaagccgcgcaggttgtagcttttcacaatgtcgcgcaactccagattctcttctttcaggcgcattacggaggaaccggtgaatacgattttcaagttggggaaacggtcgtagcatatgcgcagctccttgctccactccgggtatttgaatacttggtctatcaacagcacttttcctccgcggcgctggaattcggcggcgaactccacgatgccatgtccggagaagtagaagttgttcatgttgatgaagaggcaggagcggtctgtgccgaatttctctttggcatattgcagcaagaaagtagtcttacctacgcctcttgtgcctttgataccgataagacggtcattccagtctatttcgtccattaggtcgcggcgtacgggggcattggtatgctctacgagataagcgtgtgtacggtaaaatgcttccatgctttaaattcggtttatcgggcgacaaatatacggcttttttatagatttgcaaagtagagatggcaaaatattatataactttgcactctcatacaaaacgtgagtaattggttaacatttgaaagatgaaactttatgtgttcaatcctgatgcagatatggcattgggaaataatgaagaaaattatatggcgcccgctaccatccgccgtatggctgaagacctggctttgttaccgatttggtatgcccggccgggtagtggggtactggccccttccgcctataatgcagattatctgaaacagatgcaacagttgttccggctggatgtacatttggtgacagagccggagctgcccgattatgctgatgtgcgggtaatgccttggggatggaatcccgctatccgtaaacggatgttgaaaggcggtgttctggaaaggaatcttcctacgccggatgctttggataaatatcgtatgaaggctgcccgtagtaacgctttggcttttcgtgcacttttctattccaataaaatagattatacttgtggtgacggttgttgcttggtggaggctgatggtggaactacggctatctctctggatattattggtcgttacaaagagggatgtgtgtttaaatcactttggtcgggaagtgggaagggattgtgttggtgccgtcatggctttacgaaaaatgtttccgattggtgtagtagggtgctgaaagaaaatggaggttttgtgatggagcctatatttgataaggtggaagattttgccatggaattttattcggatggccggggaaagcttctttttgtcggctattcccgttttgttacggatgacaagggggcttatcgtggtaatatccttacttcagatgggcaagtggaggaatggattcagcaatatgtgccctttgaagcatttgtgcgcatacgcaatatgatgcagaaggcattggaaacgggttatgctacatcttatacgggttttttgggtgtggacatgatggtctgccgtcagaaggaagggcatccgtatgccatcaacccccatgtcgaaataaatctacggatgaatatgggaatcgtttcccatgtgcttagtgatcatttcattgtccccggtggggagggacgtttctccatcgattgctttccgacccatgaagctttgatggagcggcatgagcaggatgcgcaaagttatccgctggtggtgaaggacggcagggttgtttccggctatctgcctctggttccggtcactccgaagagccgttaccgggcttttgtctgtgtcactgctgctgaatagcttcgctttcgtttccgcaacggtctatggctgtcacggcaaaatattttcgggcagtccacgggcggatgggggcataggtatattccgtgccttgtactcgttgtgccaggatattctccggattggaggtatctacgggataggtgtccgaaccgtagattacatacatcggagcattccgcttgtcattatccgtggcgggttgccagcttagtttccaatagccgttttccggtgtttccaccgtgagtccggcgggaggtgtaggagctacattgtctatccacggcatggcgggttgcagggccggggcggtatagaagtcttcttccagcgcatcataaagcccttgcgtattgtccatcagatacttcacgcggtagtgtgcctcgcccgctagaccgtgggcgcggataaagtgcatctgccgttcaatctcgtccagcgtccagttcccttcgctggggtcgaggaagtagatgcccagaccaggaatgatttggcgtccgttactttgttcctgccagtcaagggcaaagggatagaaatgattgccacggaaatagagcatcggataaatctggtcctggatgccctcgcccagccaaccctgcacgtcctgatagacggtgtggaaggcattccagccacgggaagggtagcgggaagtgtctttgtattttcctaccgggcaggtgctgacttttacccagggtttcatggcttttacacctttatatatatagcgcactatttccgtcaggttgtctctgcgccattgggcaaggctgcgtcctttgctgtatttgcggtagtcgtagctgtcgggaaaacggggggcgttttccggatagcgcaggtagtcgaagtgtaccccgtctacatcgtagcgttccaccacttcgcggacaaggctcatcaggtactctttggtttgcggatgtccgggattcaagaagtattcgcgtttgtagggtacgcagatggcgcgtttctttttggtgacggactctttaccgagggcggccacatgcttgcggttgcccataggaatggtcaccatccaggcatggcactccatgccgcgcttgtggcattcggctatggcaaaagccagcgggtcgtagccggggtcgccgcctacctttccggtcagtatggagttatagggctcgatggccgatttgtagaggacatctccccgtgtacgggtctggaacagtacggtgttgaagttggcggctttcagtctgtccaatatttcaatcagttcggcctgctgcttgcggatgctttcgggcgaagtggcgcgtgtctgcggccagtccagcccatagacggcggttatccaggcggcacgtacttcatgtttgggcggttgtgcggcaagcggcagcaagatggctatatatagtaaaatggaaataattcgtttcatttttctcttttcttctttatttctatcatttttctcggcgaagataagcaaaacacccgattattttgtgctgtttacttggaaactgttacatttgcatagattaaagatattaacacgccatgattacatttacgctttgcctgctggcgttgatagccggctattttatctatggacgctttatagaacgcgtcttcggtcccgatgaccgcaaaacacctgcccttacaagagccgatggtgtggattacattccactgcctacttggaagattttcatgatacagtttcttaatatagccggactgggacctatcttcggcgccatcatgggagccaagttcggcacggcatcctatctgtggattgtacttggcagtatctttgccggtgcagtgcacgactatcttgccggtatgctctccttgcggcatgacggggaaagcctgccggaaatcatcggacgttatttggggttgaccactaagcaggtgatgcgtggcttcaccgttgtcctgatgatattggtgggagctgtctttgtggcaggccctgccggactgcttgccaagctgacccccgacagcttgaataccactttctggattattgtagtatttgcttattatattctggctaccttgttgccagtagataagattatcggcaagatatatccgttgtttgccatagccttgctgtttatggctgtcggtattttggtgatgctctatgtcaaccatcccgagttgcctgaaatatggaacggcttgcagaatacacatcccaatgcggctttgttgcctatcttccctattatgtttgtcagtatagcttgtggtgcaatcagtggctttcatgctactcaaagccctctcatggcacgctgcatgacaagtgaacgccacggacgtcccgtcttctacggagccatgataaccgaaggcattgtagctttgatttgggctgccgccgccacttactttttccatcagaatggcatggaagagacgaatgcctccattattgtagatgccattacaaaagactggctgggcgccgtaggtggagtattggctattctgggtgtcattgccgcccctattaccagtggtgatacggctttccgttcggcacgtcttatcgtggctgatttcttgggaatggaacaaaaatccatgcgtagtcgtttatatatctgcataccgatgttcctggtggccatcgggttgttgctttacagcctgcgcgacaaggatggctttgatatgatttggcgctattttgcttgggccaaccagactttgtctgttttcaccttgtgggcaattaccgtttatctggtgcgtgagaaaaaagggcattatttttatatcacctattttcccgcattgttcatgacggctgtatgcaccacttatatttgcattgctcccgaaggactcggacttcagccgcagtatgcgctgccgatagctcttttggctgctgtattggccggcttctggtttaatatctggtatttcaagacgactaaaaaactttggtaatgaaaaaaataaagaaatctaccgggcttacgttggccctgcttatttacgtttctgctactgccgcttatttccttccccgcaatacggaaatcagcgatactgagaagtatgtcactgtagctgcctcgtatctcattgtatttgtgttgtggctggtacttcgtaagaaggaggcgctacaacgcaaacgattcgaagaagacaataaacaacattgattattcactcaaaaaacagaacaagatgaaaaaactggcattattcgtttgcttgcttgttgtcacagtggcagctcaggcacagtttgaaaaaggtaagtggattttgaatccgtccatcaccggtttggaattctctcatgacacgggaaccgacaagacaagtttcgggcttgaagccaaaggaggtgctttcctgctcgacaatgtggctttgctggtgcatgccggagctgcttggaattccggagggtctgacctcgatgtctatacgttgggtgtaggcggacgttattatttcgacaagattggcgtgtatctgggtgccgatgtcaatgtagaccgttgggactggggacatgatttggatgataccaagttctctttcggtctggaagccggttatgcttttttcctgacgcgtacggtgaccatcgaacctgccgcttactggaatattaacgacgaccgttctaaattcggcctgaaggtaggtttcggattctatttctaatctcattttgctactcctccacagagtttgtttttgcaaaacatctgtcatgctatcacgcgaggggggtattcgcctgactacaaatggcttgtcgcgtgatagatgggtgtgatagataaatattcttacaagtatctatcacgcccattttcgttcccattccgattgtactgcatacgtctttcattgatgctattatcttagttatcagctctttcttactgcaaagtcctgccaactttttgcaatgccactgcaaaggtgttgcagcgtcactgcaaaggtgttgcagcatcactgcaaaggtgttgcagtatcactgcaaaaggaatgcagtaactttgcagtggcgatacagtgccgatttagccgttatctttccttttctcatgccgctattgcatgtattccttctatagtcttacgaaattaggagttttctttttgattgtgattgcaggaatgagtatatttgtatctgatgctatgaacttgaaatacaaaatgccatgaacagagttcgttttctcctattgctttgctgcttgtcatcttgccgaatgaataaaacggaacgtgtggaaacgcttgaagattccgtaggtacagtaaggataggccaatggatgggagaaaaaatagtgagcgatagcctcaagatagggattgcggatgatggtgactgcttgcaaaggcaattgcttgccattcacgaagaactaggaaaaagattgaataatacaccatatatacacattcagaggaatgtgaccggatatggggtggggttgcattgcatcgatatagatttgatggtgaatactcccgagcggcggaaagagttccgggagaaaataatggactcccccgttttctgttttcatggtgtagaagtccccgtcatcaacgagagagtaggcaggaatcatattcgtggcatccatatccgtcccgaatatccggtcttttcaacgaaagcgactcaggcgacattcatcctcagcaatcacagcggcggagatttgacctgcggcgagcattactacctgacgttcgaagacgaaaaaggtacctggcgggaattgcagataaacgctgccttttgggacatcgcctatgtgctgcgggatggggaggaaagggttatgaaagcctccctttatccggatgtgcatcccaacaagccgggacgctaccgttacttttatgagataaccatcaggaggaaacctgtcttgatgatggctgagtttagactgacggacaatgaggaagaatggagaacggcggaaaagacatctcttcctccttatgtctcggatgcagggaagggcgggagcccacaattgataacggaagagccaatggaagaaccggtctataaagtagtggaagtgatgcccgagtttccgggaggcatgaaagccttgatggattttattcaaaagaatgtccgttatccggaagaagcccataagaatggcattcaggggagagttattgtcagcgtggtgattgacgagaatggtcgtgtggtggaccccgttattatgcgcagcaggtatcctgccttggatgaggaagcattacggattgtaggattgatgccacaatggaagccggggatgcagcaaggtaaagccgtgaaggtggaatttacttttccggttacttttaaattggagtagtggcacccggtaagattaagcacaaagacacggaggcatggagttttattctttttccttgaatttaatatctctgtgtctccgtgcctctgtgttctatttaaggaagagaggggtgtaatttctcttgcaagaactgccccgtatagcttgccgcacacttcgccacttcctccggtgtaccggtagctacgatgtttcctcctttgtcccctccttcgggtcccaggtctatcacatggtccgcacatttcaccacatccagattatgttcgatgatgacaatgctgtgcccgcggcgtatcagggcatcgaaggcttcgagcagtttcttgatgtcatggaagtgtagtccggtagtcggttcatcgaagatgaacatggtcgggtccgctttctcctggctgaggtagaaggcgagtttcacgcgctggttctctccaccggagagggtggaggaggcttgccccagtttgatatatcccaaacctacatcctgcaagggttgcagcttcttcacaatctttttctgtccgtgttgcgtaaagaattcgatggcttggtttacggtcatctccagtacgtcgtagatattcatgttgtggaacttcacttccagcgtgtccgccttgaagcgtttgccgtggcaggattcgcattccagtacaaggtctgccatgaattgcatctccacagtgatggtgccttcacccttgcactcctcgcaacggccaccttcgctgttgaagctgaagtatccggcactgtatcccatctgcttggcaagtggctggtctgcccatagtttacggatttcgtcgtaggccttgatgtaggtcacgggattgcttcgcgatgacttcccgataggattctggtctacaaactctacattgcgcaggttctgcaaatctcctccgatggaggtgaactcgcccgggcgttcgctgcattcgtccagctcgcgtttcagggcgcggtagaagatgtcgcgcaccagcgtactcttgcccgaaccgctgacaccggtcaccacggtcattacattcagcgggaagcgtgcctccacacctttcaggttgttttcgcgggccccctttatttctatatagttgttccacgggcgacggtgttccggcagtgggattgtctcttcccccagcagatagcgcacggtataactgtcactgtttttctgaaggtctttcatgtctccctgatagaccacctctcctcccaagcggcctgcccggggaccgatgtcgatgatatagtcggcagcacggataatctcttcatcgtgttccactaccactaccgtattgcccaactgttgcagctggcggagcacgtgtatcagtttgtccgtatcgcggctatgcaggccgatactcggttcgtcaagaatatacaggctgcccaccagactacttcccagcgaggtggctaggttgattcgctggctttcaccgccggagagcgagttgctgaggcggttcagcgtgaggtatcccaaaccgacatccaataggaactggatgcggctgttgagttctgtcaggatgcggcgggctatgtcggcgtcatgtgggtctagttgcaggttgtcgaagaagagcttcaactcagtgatgggcaaatctaccagttcggagatgttgcgtcctcccacgcgtacgtagtttgcttcgggtttcaggcgggtgccgtgacatttggggcagagcgtctttccgcggtagcgtgccagcatcacacggtattgtatcttgtactggttttcctgcaccatcttgaagaaggcgttgatgccctcaaagtagggtgtcccttcccacagcatccggcgttgctcgtcggtcagttcataatagggagtgaagatggggaagtcggctttctcggctccgtgtatcaccatatccctccattcgcccatcttttcgccccgccagcatactacagcgccgtcatagacggacaaggagcggtcgggtatcacgagatgctcgtcgatgccgatgactttcccgaatccctcgcatacggggcatgcgccgatgggagagttgaaggagaacatctggtcgttcggttcttcgaaggtgatgccgtctgcttcgaacttggtgctgaaacgatagaggcaggtactcccgtcaggctggtagaaacgcagtaggcaggcaccgtctccttcgtacatggctgtttcggccgagtcggtgaggcggctgacggaatccttttctgaagaggctgtcatacggtcaatcaacagaaaaactgtgtctccggctttcggcttgtattcgtcgatgcgcatcatttcaccattcacttccagacgggtgaaaccttgcttcatgtctatctccagttgttgttgcagcgtgcggtcttcgcgcagcaatatcggggcgagtacggtatatctggttccttccggatattccagcatgcacttcacgatgtcttccgccgagtgcttcttcacttccagtccgctgaccgggctgaaggttttccctacgcgtgcgtagagcaaccgcagatattcgtatatttcggtggaggtgccaacggtggaccgcggattgcggctgcttactttctgctcaatggcaatggcaggtggaatccctttgatgaaatcgcattcaggcttgctcatacgtcccagaaactggcgggcataactgctcaagctctccacgtagcggcgttgcccttcggcatataatgtatcgaaagcaagtgaggattttccggaaccggacagtccggtgatgactacgagtttgttacggggaatctctacgtcaatgttcttgaggttattgacacgggccccttttatgataatcgatgtattttctgccatatctgtaggttggttcggtggtttacagaatgcaaagataatgtttgctatccgaattgtaacaatcaggcaaggcaaaagtggatttattggggaggaaagatacccttggttaagatttgttatactttccgctttttaccggtatacttaggacaaaagaattaatttcgcttttttaataaaagctattgaccggaatatgagaataaaatccattttatgcctatgtcttttgtcactgatggtggcaggaggggcatttgcgcaagtgcagaccgggtctgcctatcctaaacgtgaatttcgtgcagcatggatacagtcagtaaacggacagttccgtggaatgctgaccgaaaagctaaagcagaatctgatcgggcagttgaattccttgcagaaggcaggaatcaacgccataattttccaggtacgtcccgaagcggatgctctgtatgcttccagactggaaccgtggagtcgtttccttaccggagtgcagggtaaagcgcccgaaccttattgggaccctatgcagtttatgattgatgaatgccataaacgtggcatggagtttcatgcatggattaatccgtatcgcacgaagacgaccttgaagagtgagttggctcccaatcatgtgtacaatatccatccggaatggtttgtcacttatggcgaccagttgtattttgacccggcactgcctgagagccgccgacacatctgcatggtggtgagcgacattgtttcccgttatgatgtggatgctatccatatggacgattacttttatccttatcccattaagggaaaggatttccccgacgatgcaagttttgcacgttttggtggaggattcagcaataaaggagactggcgccggagcaacgtgaatgtgctgattaaaaaactgcatgaaactatccgtgaaatcaagccgtgggtgaagttcgggatttctccgtttggtatttaccggaatgaaagcagtgacccgcttggcagtaagaccaaaggcctgcaaaactacgatgacctttatgcggatgtactgctatgggcccgtgaaggttggatagactataatattccgcagatttattggcatataggacatccggttgccgactatgagacactggtgaagtggtgggctaggaatacggaaaaccgtcccttgtttatcggtcagtccgtaatgaatacagtgcagaatgctgaccccaagaacccctcaataaatcagcttccccgcaagatggccttgcagcgagcttatcaaaccatcggtggcagttgccagtggcccgccagtgcagtgattgagaatgcgggcaagtatcgcgatgctttgattgccgaatatcataaatatccggcattgcctcccgttttcgattttatggataacgaagctccaggaaaggtgcgtaagatgaaaccgatatggacggaagacggatatattcttttttggacagcacccaagtataaagaggagatgaatcgtgctgtccagtatgtagtttatcgttttgatgccaaagagaaagtgaatatagacgatccttcccatattgtagccatcacgcgtgataatttctataaacttccttatgaagacggaaagacaaagtaccgctatgtggtgacagccttggaccgtctgcataatgaatcgaaatccgttggaaagaagattaaactttaaaaagaaaattaaggattagggattaacgtctaatccttaatccctaatccttaatttccctccttaataaagtatcaaccctgctattccacaggctacaatcattcctatcgggttcagtttatattttttggtgcctacaaatgccacgaggaaaatgaggcagctgatgacgaaggaatatgtgttttctttgggagaactgaagttttccgaattcatcaataccagcgcggctgaggccagcagaccgaccactgccgggcggagcccgctgaataccgcttccacggaaggatgtttctggtatttcagaaagaatttgctgatggtcagcatcagtaggaaagaggggagcactacggcaaaagtggcggtaatagatccccatacactaccggtgacagtaaaacctacataggttgccgaattgatacctatcggaccgggtgtcatttggctgattgccacgatatcagtaaactcttgaggggaaagccagccataacgggtgactacttcgccttgtatcatagacagcatggcatatccgccgccaaagccgaaaaggccgattttaaagaatgtatagaatagctgtaagaaaatcatggttagtgattaatggttagtgattaatgattagtgttattgcacctttcattttttaattctttcatttttaattcttcgatgtttccgacgtccgaaggcatatccccctgcacctgctgcaatgataatccagatgggggagaagtccagcagccagatgagcagtgctgaaaccaccggtatccatatattgtatcggtttatccgggccgatttggccatgctgaatgtaggggcggcaatcaatgcaaccactgccgggcggatgcctttgaatatacgttccacaatggtgttgttcttgaagttgtgaaagaacaacgctatggcgaggatgatgagaaacgaaggaagtatggttcccaatgcagtgattatgctccctcgtattccccgtagccggtaccctataaaaatggatatattgacggcaagaatgcccggagcggactgtgatatagcaagcaggtcaatgaaatcttctttggctatccagtttcgtttggttacgatttcgttttctatcagtggtaccatggcataaccgccgccgatggtaaaggctcctatcttaaagaatatggagaatgcttcaagatatatattcatattcaaaatgttgtaatttactttatttctttatcatctttcccttctttccctctcttggcatattggcttgggctcatatcgaaatgtttcttgaatacttcacggaaatatttcgcatcactgaaaccggtcagctctgaaatctcggtgatggtatgcttttgttctttcagaagttgggcggcatgtttcagtcgaatcagccggatgtagtcagccggagcttggtcggtcagtgcctttatcttgttgtagaagctggttctactcatattcagcaggttgcagagcacgtcgacgttgaagcttgggttgtccatattgtcttcgacactctttttgacggttgcaatgaatttccagtccaagtcgttggagcagttgatgcaatccgtattgtttttctcgtcgttcaggtccaggctggcatatttgtggcgcaacagtgtccggttagtcagtaagttggcaatgtttgcccgcaatataccgatattgaagggtttcacaatatattcatctgctccgctttgcagtccctcgatgatattcttgtcggtattcagtgctgtgagcaggatgatggggatatgtgatgtctcgatgtcgttcttcaggatatggcacaactcgtctcctctcatttccggcatcatgatgtctgaaatgactaggttaggcatatactccttgacaatgatcagtgcctcttttccattggagcatacttgtatgttgtactgttcagacaatgttctgcgcagatattcccttaattcgtcattgtcctctacaataagaattttctggtggctactgttgttttgcgactgttgctgcgtcttgtcgtagatgccgctggaagcaggggacggtgtggcggaggcattgatgggcactccggaagccgaataaacaatccgttcgttttggggttgagggcgttggattgccttgcggaaatgcttgttccctttggggaacgtgattttgatgcaagagccttttccttccatactgctgaagttgagctttcctttatgtaagcgtacaagtttcccaaccaagagtagtccgatgccgctgccggtaactttggaattgatagcattgctgccgcggaaatgcatcttgaacagctttttttgttccgaggccggaattccgataccggtatctttcacctcaatactccaggtatcttccgtctcggaagtaaagacatgtacattgccgccgtccggtgtatatttcaatgcgttggatatgatattcttcaaaatggaatccatcttgtccttgtccaaccatacgttcagataacggaaactgctttcgtaggtcaggttgatgtgttttatgtttgcgtatggacggaatgcatcgattgtctcctccatatatgtgctcagttcgtattcggatacgtatagacttccggaataggtgtctgctcgttcgaaattaataagattggtggtcaggcgcaacaaggcatttacgtttcgcagagctgtgttgatgttgctctgtccgctggaagtcagttgttcgcgttcggtgatttcttccaagggtgctttgatgagcgtcagtggagtacgtatatcatgtgccgtgttgacgaaaaagcgtattttctcgtcggattctttccgctgttttctcaaggctatgattcgcagggcgatgcttgcaatggatatgataatcactgcatagagtattaatgcccaaaaactgagccagatgggttgttcgataatgatgttcatactacgttcctccaggacaatacggcggtcttcgttggagatggcacgtacgcggagggtatagttacccggactcagattggtaaaacgaatgacattttcctgtcccgggcggctccagccctcatagaatccttccagcttccaagagtacagaatcagggaagggtagtcatagtttatatcggaaacttgcaatgagaagatgttctggttgtacttcaaacgcaaggtttctgtctcgtctatatcctgaataagtggggaaccttcatctttgggataaacggtctgatagaaaacccgcaggtcgctgaataccattttgaatttatagtcacgtggcaggaccatgtccttatcgaactctatggctccgtccgtactgccgaaaatgaaattgccgtttcctcttaaggtgcctgaagctgcattgaaatgatctgacttcagtccttgttctttggtccagttatggaatgtctcttcggcaggatagaaggtggacagaccgtgttctgtactcagaaagatatttccttttccatcagacaatagtgtatagatattattggaaatcaaggcacagttgtctctatgatagtgtctgaatgtatttttggccgtatcatataccagtaaaccggcattgttggtaccgatgtacaacattccgtcagaggtctggcatagagagtagatatagtatgattctactggcattcggatataggtgtacttgccggttgctttttctaataagtataggccggttgcagtgcctatccacatatgtgtggagtctttttctataatggcggtaatgccgttcagaccggggaaatgccgtatgcttttgctggaatagtctatttccttcaagttataataccctccggaccagatgtttcctgaagagtctttcatgatagaacggatatacttgtccggccggatattgaggttgctgaataaggatggagtgaagaaatctacggactgttgcttcttgtttatctgatagatgcctgaactgtaacctccggcccagatgataccaggctcaacctcgcatagtgagataaaggtgtggtttttactgtggcttgcaggatcgaaggtactgagaaaagaatgccattggtttgttttactattataaaggctgatgccgttgttggtggcaaaccataaatctccgtcatgatcttcgatgatggcatttacttggtcattgatgagtgactgtttattaccgatagagtgttttatccattggtaatcggcatatcggttgtcgcgtacggtgataccgatgggataattggctatccagatgcgttgttcgctgtcaatgtagatgtcgttgatggtattcccgttcatagagttgtgccggttgtagtcggcaacaatgtatggtacggactcataagtagcagcgttcattttgtagatgccggctccgtctgttgcaatgagaatttcattgtcagtgtaggaacggatgcagttgatgctgacatccatcaggccggacggtatatgcatgactttatgtttgttcaagtcatagacaaatattcctcgttgaaaagtaccgataaaaaccttacgggacggtttgtgatagtataattcgttgatttgtacctttaaggtatccaattggtcgcagggactcaaggtgagtacattgttttccaattcggcataatgtatgccgatgtcggttccgataaagaaatgagttgagtcaatctgtacgatgtccgtgattcgttcttttatttcattttgaatgaaggtcactttttgagtattactgtcgtacagatatagggcatcttcattgcaaagccatattacgctgttggcatccacaaaaccatagctgatgggagtaggacgtccttttacttcattttcgggtagcttgtatactaagacaaaacggtcgtgtcttgtgtcgtagcggaacacacgtccttttttgcctatttcccatatggttcctttaggatccacatagagccagttcagattcatcatggaatttacttcttcatctccgtccatcagtttgtaagacttgaaatcttttccgctatatcggtcgatgccgtcgtgggtgagaaaccacatgtaacctttggggcccttttgaatggcatatacccgtctgttgctcaaaccgtcttccacatcgatgtacttgtatgtttgcgcaatgcctataattggcaataatagtagtatgtagaaaaagaagtactttttcataattgtcgaacggtttttgaatgttgtactgagggagagttgaaaataaacacaaaagtagtgcttttgttcgagaaaagcaaaaggaaggcaaagaatggaaaaaatgaacaagcgcggatttatttgtcaacccgcgcttgtcacatttctattaagaaggaagttctgtttattttttattggcttccacccacttgcgtgcattgacaaacgcttctatccaaggagtgatttggtcgctgtttacgcggtctgcggggtagcaaccattttgccaggggaagatagcacgttccaagtggggcatcatggccagatggcgtccgtcggcacttgccaatccggctatggaataatccgaaccgttggggttggcagggtattcgtcgtatgagtatttcagcacaacgttgtatttgtcctcatcgtacggcaaagagaatttgccttcgccgtgggccacccagatacccagtttactgccgctcaaagacccgagcattacactgcggttagtgggaacggtaacaccgaggtatctggattcgaatttgtgggaatcgttgtgcaacatcttgcctttcttttcaagctcgggattgataaggttgagttccatcataagctggcaaccgttgcagacgcctagcgaaagcgtatccttgcgtgcatagtacttatcgagcgcttctttggctttcggattgaaaaggaaggcaccggcccaacccttagcagaaccaagcacgtcggaattggagaaaccaccgcagtaaacaatcatgtttacatcttccagcgtctcgcggccgctgataaggtcggtcattgtaacatctttcacatcgaagcctgccaaatagagcgagtaggccatttcgcgttcgccgttagtccctttttcacggatgatggcagcgcgtataccggaaggtgtgcggcggtccggggtaatgccgtattgtgagaacttgcctttgaagtccggcatgaaggcgaattccaccggttgcatcttgtagttctcgaaacgcttcttggcacagccgttcatggactgtttacgatcaaggagataagaagtggagtaccatacatcacgcatatagtcgatgccgaactgataagtagcatcgccttttgatacaagaatatggcgttcgtctgtcggtttaccgagtttcacataacctacgcctgcatcttccaggatttgctttactgtttccttatgcttgtcactcacctgaataacgatacccggattctctgcaaacagaatcttgataaggtcttgctccttgattttatccaggttgatttccataccgccctccacattggcaaagcacatttcaagcagtgtagtgataaggccaccggcagaaatatcatgtccggcaagaatcagtcccttgttgaccagctcctgcacggcaaggaaagcatcgcggaagtattcggcatcctgcacgcagggaacttcgtcacccactttgcccagggtttgggcgaaggcggaaccaccgagtttcaggttgtcgaaactgaagtctatatgataaatggtagttttttcattgttgaccagcactggagaaacgaccttcttgacatcggaaacttctccaccggcagaaacaattaccgtgcccggagaaatgactttgctgccgtcggggtatttctgtgtcatggaaagagagtctttaccagtcggtacattgatttgcagggaacagcagaagtcgctcaatgcctttactgccgtgtacagacgggcatcttcaccttcttgcgaacggcaaggccacatccagttggcagaaagggaaacgctgtccagaccttcggcaagcggtgcccaaaccaagttggtcaaggcttcgctgacggaaagaacggagccggctgccgggtcggcaagtgccgcctgtggagcatggcccagagaggttgcgatacccttttcgccgcgatagtccaaagctaccacaccacaatcgctcagaggcaactgcaattcaccctggcactgctggcgagcaatcttgcctgttacagaacggtctaccttgtttgtcaaccagtctttacaagccacagcttccagttggagcacattggtgaggtattcatgtagttgggaaagttcgtattggggcattttgtaatgacgttccacggtcttgtccaccatataagtcttgggggaagagccgaacatctgttctacggcgaggtcgaacggacgtacaccgtcagcttgctggaaggcaaagcgatggtcaccggtggtttcacctactacgtacatcggagcgcgttcgcgttcggctaccttgcgtacatgttcgatggcctcttcctgaatcagcaagcccatgcgttcctggctttcgttggctatgatttccttggcagacagcgtggtgtcaccgatgggtaacttgctcatgtcaatcaggccgccgcattcctctaccaattcagacagacagttaacatgtccggcagagccgtggtcgtggatggagacaaccggattggtctcttcctcacaaagtgcgcgtaccacgttgtaggcacgtttttgcatttcggcgttggcgcgttgcacggcattcagctcgatgccactgctgtagcgtccggtatctacggaagatacggagccgccgcccagaccgatgcggtaattgtctccaccgataacaaccactttgtttccggcttccggtgtacctttcaaacagtcgcgttgggtaccgtagcctacgcctccagcaagcataatcactttgtcgtaaccatagacttcatcattttccttatgttcgaaagtgagcacggaaccgcagattagcggttgaccgaatttgtttccgaaatcactggcaccattggaggccttgatcagtatttgttcgggagtctgatacagccatttgcgtaccggcagaatctcttcccaaggacgtccttcttccgtacgggggtaggaggtcatatagacggctgttccggcaatcggccaagagcccttaccgccgcccatacggtcgcggatttcaccgcccgtaccggtagatgcaccgttgaacggttctacggtagtgggaaagttatgtgtttccgctttcagggagatgacactcttgatgtcttttacttggaaatagtcgggcttggagtggtctgccggagcaaactgttcgataaccggaccttcggcaaaggccacattgtctttgtaggcagagataatcttgttgggattctcttgtgtggtcttctttatcatttggaagagtgaagattcttgttctactccatcgatgatgaatgtcccgccgaagattttgtgacggcagtgctcggagttgatttgcgcaaaaccgaatacttcggagtccgtcagagggcgtccaagatctttttctaccttcttgaggtagtccatttcctctttggaaagtgccagcccttctttctcattgtattcctccaggtcttcgatgtgtacaatcggttccggttgccggttggttgtaaatacattctggtccagccccttgtacatacgttgcagcatcgggtcatggtctgcattctcatcttttacggggaaatactcctcgatgcggataatgccgtccagtcccatgttctgggtgatttctacggcgtttgtactccacggagtaatcatctcgcggcgcgggccgacgaaatgtcctttcaggttgtcttcactttcgggggtggcttctccaaaaagccagcagagtttgtcgctgtctgcctgggggagttcatgattacattctacggcaatcacactcttggatggtgttctgaaaaaaagaatcatagttatatttacgattttacgatttacgattttacgattgaagttacttctttgaatatcttcatcttttcttcttggggacaaagatacgcaaaatcggtggggaggagaaaaaaaggaaaacaaaaaacgcatgcaattttacttgtatgcgttttttattctgttttataaagccggatgtatattattgtatgacgatttcatccgtaaataagaattgtttcttcccttgtatggcgtggaagcgtacataccgtgcttcagtaggggtgccggtccatccgaaatctctgaaaatcacgtcttttccggcatcctcctcgctgcaagtatcactgcccagcagggagaattctttgccgtccactgatgcccacacttctactttggctggaagaaaaacctgcggggtacggatttgcatgaagttggccatgacccggtgtatagcggtcacttcgcccaagtcgatggtggcatccaaatcattggggcagaatccctgccaacgcccgtccatgtagcttttaccgccgcgaagtccgtcgaggagaccggtgtcaccgccgcctttgtatacttctttatgctgatagtatccgccgcccggtgcataggttatctttttgcctatgcctttgtgatagtcggtgcgcaggtgaaggctttttccgataggcttttctccatcgaaaagacgtgcggtcagcaatatggagtcttttacggcaaacggtttcttgtataacttggaagacgcagtcggttcggaaccgtccgttgtgtagcggatgtcaatcggatgtttttcggaggtgagggacagcatgattcttttcttggcatagtcaacggtctggctggtctgcactagttccgacaaggtgaacgggttgtagcctattgctttgatatggcgtatttcgttgttgatacgtctcttgaaactttctgaatgcttgttcttcatgggagtccatcctacttctgccagagcgatgatgcgcgggtatatcatatattcggcatgttcgtaagtgggtagatattcggcccatacattgccttgcacgcctaatatgtatttgcagatatcactttccaatgagtcgggagccgggtcgtaggagtaggtctgtccgatggggacgcaggcgccgaacgccagcggctgtgtctcggggtcatcctggtagtggtccagataacagtggctctccggtgtcatgatggcgtaatgccccatgcgggcggcggcaatgccaccttccgtaccccgccacgacatgacggttgcgttgggggccaggcctccgtccagtatttcatcccagccgatgatttcacgccctttgtcgttgaggtacttctctatgcgggctatcatatagctttgcagctcactttcatctttgagcccttcttccttcatgcgcttctggcatttgggacatgctttccagtggcgtctgctggcttcatcgcctccaatatggatataacgggaagggaacagccgtatcacttcatccagcacatcttcgaagaacttgaaggtctcttcgttgccgatacagacttcaccggatgtataaggctcgccagtacaggacagctgtggataggctgccagtacttctcctgagtgtcccggcatttctatttcggggatgacggtaacatgcctcaagcgggcgtattctaaaacttcgcgtacatctgcttctgtatagtagcctccataggctccttcttcatccttttcgcagaagcggtggttatatttcccccaatcctgcagattggcggcttttctccaggctgcgaattctgtcaggcggggatagcccggaatctccagccgccatccggcaccgtcggtcagatgccaatgcaggcggttgattttgtaggtggctaccaggtctatttgtttcttgacatagtccgtgttaaagaagtgccttgaaacatccaggtgcagcccacggtaggggaatctgggttcgtccttgatggtcgtgactggcagttccttcccgttacgggcaagttgtgccagggtttgcagtccataaaaggcacctgctgcggaggaggcctgaatatttacaccttgtttgctgactgtcaggttgtagccttcggcggcgattggattgtccgtctcgtccgttatttctatcgttacaaaaggattcttgtcgacaagcttcatggggatggcaaagtccggcagataggccagcaggtcattcatgtcggatttcgccaaattggtcgagaaggttactgtagatggcagttcgactgtttttgacgtagtttgggcatactgcggatatggaatcacaccgagttccttgggagcttcgcatgccgtcagtagtaagacggtcatggaaacgagtgctagagttttttttattcgtttcattagggggtattgttaagttcggaggtaaatatacggaataatatgtaaaatggataatctttacttcttaaaatccttttccgtcgaaaaaacgttaacactattcgttcgtctcataaaaaagtccgatatttgcagccatgattcagatagagaccatatttgacatattgtggaaggggttcattatcggcgtcattgtgtccgcgccattgggtcctgtaggagtattgtgtattcagcgtactttgaataaaggacggtggtatggtttcgtaacggggataggagcttcgctgagcgatattgcatatgccttgctgacgggctacgggatgagtttcgtttttgattatgtcaacaagaacatcttttacctgcagcttttcggaagcattcttctgttggcatttggcatttatacgttccgcagcaatccggtacagtccatccggccggtatccaccaataagggttcctatttccataacttcataacggcgtttgccgtcacactttccaatccactgattattttcctttttgtaggccttttcgcccgcttcgcttttgtaagtgagggcgtgctggtgtttgaggctgtcaccggatacttggccatcgcattgggtgctttggcttggtggtttggcataaccttttttgtcaataaggtccgtacacaattcaacctgcgaggtatctggatactgaaccgtattatcgggagcattgtcattgtggtgtctgtgatgggactggtgtttacgctgatgggtgaatcgctgtattaatggataatcgatagtggataaattgataatgaagtcataaatctaaggttataaatcatacattttatcgtgaagattgcgcaacaactgaaagagaagaatatagccgaataccttatatatatgtggcaggtggaggacttgctccgtgccaacggctgtgacatagaccggatacgccagaacatcatcttgcgctatccggaggaggaatggcctgcgctggaagaatggtatggaaacctggcagatatgatgcgtgcggaaggcgtaacggaaaaagggcatctgcaaatcaaccgtaatgtcattctgaatctgacggaactgcatggcgaattgctggcttctacgaaatatccgttctataatgcggcttatttcaaggcactgccttttatcgtggaactgcgtcagaagaacggccggaaagaggagtctgaggtagacacttgtttcgaggcgctttatggagtgttgctgttacgcttgcagaagaaggaaatcagtcagggcacggcaaaggctatggaggccatcagtggtttcatctcgttgcttgccaactattatgacaaggagaagcggggagaactggagttgatggataattgatagtggatgattgataattatgaaggaaaatattgttcatcgtaacattctatatataagtgtaactttattaaatgaatattctgataaccggtgccaacggtcaacttggcaatgaaatgcgagtgttgtcgaaagaaaacggacaacatgcttattttttcactgatgtgcaggaattggacatttgcgacgaacaagctgtgcacaggtttgtgaagggtaaccggatagatgtgattgtgaattgcgctgcttatacggcggtggacaaggcggaggacaatcaggaactttgcgacaagctgaaccatgtcgctcctggctatctggctgccgctgccgaagcttgcggtgctgccttgatacaagtgtccaccgattatgttttcgacggaaccggacacactccttatacggaagaggcggccacttgccccaattcggtatatggctctactaaactggcaggtgagcaggcggtgatgaagcattgcagccgtgccatgattatccgtacagcatggctctattccatttacgggaataattttgtgaagacgatgcttcgtctggggcgtgagcgagagacgctgggggttgtcttcgaccagataggtacgccgacatatgccaatgatttggcacgtgtcatttttgcggctgtcaaccgggggattgttcccggtatctatcatttcagcaacgagggtgtgtgctcgtggtatgatttcactttggctatccatcgcctggccggcataaagacctgcaaagtaaatccactacatacggacgaattccctgccaaggcgccgcgtccgcattattccgtactggacaagacaaagataaagaagacattcggcatcgatataccccattgggaggagagccttgctgtctgcatgaagaatttggaagagtgattattactgactaattgatatatggccaataacaacgaaatagaaagacggagaacgtttgcgattatcgcgcatccggatgccggtaagacgtcattgaccgagaagctgttgctttttggtggacaaatccaggtggcgggtgccgtaaagagcaataagataaagaagacggcaacgtcggactggatggatattgaaaaacagcgtggtatttccgtcaccacttctgtaatggagtttgactaccatgactacaaggtcaacatccttgatactccgggtcaccaggactttgctgaagatacctaccgcacgctgacggctgtggacagtgttatcatcgtggtggacggtgcgaaaggtgtggaaacgcagacacgcaagctgatggaggtctgccgtatgcgtaatacgccggtgattatcttcatcaacaagatggaccgtgaagccaaagacccgttcgacctgctggacgaactggaggaggaactgcacatccacgtgcgtcccttgacgtggcctattgagagcggtgtccgtttcaagggtgtctacaatatctacgagcataacctcaacctctaccagcccagcaagcaggtagtgacggagaaggtggaagtggacatccataccgaggagctggacaaccagattggcgcccagctggccgataagctgcgtggcgaactggaactgatagacggtgtttatcccgaattcgataaggaggaatatctgaagggtgagctggctcctgtgttcttcggttcggcactgaataatttcggtgtgcaggaactgctggattgctttgtggagattgctcccagtccccgttccgtgaaggcggaagaacgtgaggtggagccggaagaacctaaatttaccggattcatcttcaagataaccgccaatatcgacccgaatcaccgttcatgtatcgctttctgcaaaatctgctccgggaagtttgtacgcaatgccccgtacttgcatgtacgtcatggcaagacgatgcgtttctcgtcgcctacgcagttcatggcgcagcgcaagacaactgtcgatgaggcttgggcgggagacattatcggtttgccggataacggtacgtttaagattggcgatacgctgaccgaaggcgaggcgcttcacttcaaggggcttccgagtttctctccggagatgttcaagtacattgagaatgccgacccgatgaagcagaaacagcttgccaagggtatcgaccagttgatggacgaaggtgtggcgcagttgttcgtcaaccagttcaacgggcgtaagattatcggtacggtggggcagttgcagttcgaggtcatccagtatcgtctggagaacgaatacagtgcgaagtgccgttgggagccgctcagtctgtataaagcctgctggattgagagcgatgatgcggctgaactggaagccttcaagaagcgcaaataccagtacatggcgaaagaccgcgagggtagggatgtgttcctggcggacagcggatatgtgttgcagatggcgcagatggacttcaagcatatcaagttccactttacgagcgagttctaagctatacgatttttgctgactcacggctataaatgatgcaagtcgaagaaaaagaggaggtacaaagtaatgaaaaactttgtacctctttatttattgtgggaagaaagtgttacctttgtttctgcaacgattaatatgcattgattatgaaaactgttgaagtaagctcgttccttaccgattttacaccttacttattataaacacaaaatttcaagatgaaacataccttcctttttctcctgctgattctccttctggggctgacagcctgttcgaaacctgccgatagaactttgatgaactacgaacagtccctttctcatgctgactcgttggtgcaatgcggtgctgtcgacagtgcccgggccgtccgcctgatttccggcttgcaccgtgaatacaatcagataaaggagctttccgatggcaggcatgtgcggctgaagtcggtcagtggttacgaacgttttttctggggagtgttttctgtgattatgttcagcatttccggtgctatgctgttcagccttgtccggttcaagaaagagcgccaccaccgcaactaccttatcaccttgagcgaaaacgaacagcgcttgcgcaacaatgaacgcgagcgcgaggaactggaagaatgcctgaaggagatgtcgctgaccgacgaagagcgcgaagaagtgcatagctcgctgacgaacctcatggaacatggcagccgtctggataaggaaaacgagtcactccgcgcccgtctcaaggagtatgaagacaaccccgtgccccgcgaactggaactgttgaggaaagagggcgagcgtgtccggatgctcgacgggcaggtgcaggcgcttgcttctgccgtgatagacgcagacgaagtggtgaagcagttgcgcatccagcccaaattccttgcggacagccagtggaactacttgcagaagcttactgacagagtatacaagggtgcttccaaacgccttgtcttgcgctttccccagcttacgcctgccgacagccagctctgtatgcttatccgcctgcacttcagcaatgcacagattgccacgctcattgccgtgtctcccgcttccgtgtcccagcagaagttccgcctgaagaaacggatgatgcaggcagatggtggactgtttgctgatggagagacgctggatacagtagtgtgccatgtctgaaatttcggattgcaagacaacagtgacaagggtatgaaactattaggtggcattaagataaattgggcccgtaatttctttacggaaatccttttccgtatcttcaagtgggatttgtcaagtccggctaattatgagttcataaaaacgctatcaaagacggtatcataaaaaatggtattgtatatggaccgaacgaatcgggtaaaacaaacttcagtttggccttattcgatattgagaaccatttgtcgccccaatggaagaagatagattattgtgtgaattttatttatgccggaaagaaagagggagtagtcgggttcgaatatacatttaggtttgagaacgggatagttgtctatgtctattctaaaaatgccggtggtatattagtgtccgactcgcttcgggtggacgataattgggtttttgaacggaagaatggttctttttgcatagacaagcaacagtttcctatggaagaaaccatagagaataacctcggaagtaatgctgatatttttatatgattattttaggaatatagccaatttgtgttgatttattaggacaaaaagtcggtgatttcctctgttctcaattctgttttgctactaatataacctcggtcttatactgaaccctattcagtcttatactgaatgccattcagtcgtatattgaatcctatttagtcgtatactgaattaccccacttcagaaggtgttctgggaggggatggactgtgacggtttgatggcttgaaacggatgtttttgggatttgaaatgttgttacaaaatgaaataagaaactgattggtgacttaaaaaatattgttattccttgttatttcaatagttcgctctctatcggactgctgtgttgaattgattacggatgagagcatagaatcaaattgctccataattaaaaatatccctccaaaagaagtgagtttaccggattttatgcttatttttgtcatgcttgttgaagatttcttgtgcttttttgcaacactaatttaagtgaatcttctgacatggcaaagtactgggcaatattttattactcagtactttaaataattgttttgtaaagtgccgcagaactaaggtctaataaaacgaggatggaacattccaaattaataaacaatataaacgagcgtgtagtggatgacatcaaaggacggttatccaaaggtacttttgtgtctattgctgcggcttcattctccatctatgcctacgaagcattgaaagaagaattggagcaagtggaacaattgcgtttcattttcacatctcctactttcatcaaggacaaatcaaagaaagagaaacttaaaacattagaaaataattaagaaacaagatatatgactgacatattaaaacatttggatttgaactctgcagacggaacgcaactcaatcttgatgcgctctatcagatagcaccttcggcatttaccgaagtacgtgatgacaagactggtgaaatctcccgaaaggtaaacttcgaggtgcttcgccggttgcttggcgaccatgtcacagacggcgatggcgagatgtatcagtttacatgggtaggtaagaatgccgctcgtgcggaggctgccaaaccaaccgataagacattacgcccggtggtggaagattccgtggattgggacaatacgaagaatatctatatcgaaggtgataacctggaagtgctcaaactcttacaacgctcatatatgggtaaggtgaagatgatttatatcgacccaccctataatactggcaatgactttgtgtatcatgacgactttgctctcactgctgccgaagaggatttcaaagccggcaatgtggacgagttgggctatcgcttcaggaagaattccgatacgaatggtaagtttcattcggattggtgcagtatgatttatagtcgtctgctggtggctcgttctctgctcacggaggatggagttatctttatttcgataggtgatgatgagaatgcaaatctcatcaaaatatgtgatgaagtctttggcgagcataatttcattgctgatatttgccataagcatagagcctctgtttctaatgatagaatcatatctgagaatcacaatcacattgcgttttatgccaaagaaataaatgaggtgtttgctcaacaaaagaatataggagaagaccctgtattagacggatttgatcgagaagacgataagggaaaatataaattggcacctgtagatggtcctggtggagcaaagaaaggtaatcctttttacgaatttatgggcgttgaaggatattggagatattcaaaagagaccatgcagaaactgtatgataatggactgcttattgtcacagagaacaatctccagaagaagtattacgaagatcaggctcgacaatcaagaaaaaaagttacgacttggtgggatacagatttcttaacttcttccgcaacttcatatcttcagaaattaatgggctgcaaagcattcgacaatcccaaaagtataaatctcttgataaggatgctcaagatgatgactcattttgataaagatgcacttatcctcgatttcttctcaggctctgccaccactgctcatgctgtaatgcaactcaacgccgaagacggaggtaacagaagatatatctgcgttcagcttcccgaagaaacgccagaagatagcgaagcacgtaaggcaggctacgccactatccctgagatagccaaagaacgcatccgtcgttccggtgcaaaaataaaagcagattcctcgcttactacccaaaacctcgacaccggtttccgtgtctaccgccttgacgaaagcaactacgagaaagtatcactttcacccaaggaatacaagcaagaccagcttgacctctttgcctataatatcaagcgcgatcgtactgacctcgacctactctatggttcgatgttggcatggggtgttcgcttggacttgcccttgcagacagaaaccatggacggttgtaccatctacactgtcaacgaaggcgaacttgtggcttgcttttccgagggcattaccgataaggtagtaactgcgatggccgacaagagtcccttgcgtgtacttttccgtgatgcctgcttcaaggaagatgctcagaaaatcaatatttatgagcagttcaagcaatccttggattggtcggataatgatgcgtttaataatatcagagtaatttgacgtgtccatggaagagaacaacaaaatactaatttatacagacaatgacggtctgacaaagatagatgtgaaatttgaggaagatactttatggcttactcaaacgcagatgtgcgagctgtatcagacgagtaaatcgaatgtaagtgagcatattaagcacattttcgaagaaggcgaactacaagaggactcagttgttcggaaatgccgaacaactgccacagatggtaagtcatacatgacaaccttctataatcttgatatgattatcgctttacttgatttcgcagaaagccaagccgagaaagagcaacccatgaccatgaacgattgggcaaactatctggatcgcatactcacctcaactggagaacaactcctactggatggaggcctagtatcccatcaagaagcgatggatcatgccgctactgagtatcgtaaatataaacaacgcacactcagcgatgtggagcaagactatttgaacgctatcaaggcgattagtgacaaaagtaagaaaggaggcaaaaagtgaaaataagatataaacatcaacgctttcaagcggaagccgccaaatgcgtgagcgatgtgtttcaggggcaacccaaacacgatggcagccgcaccttcttgaacaagtttggtgcgctcaacttcgacggtttcggcaattttccccttgtacttgacaatgaaagcatttgcgagaatgtgcgtggcatacagatggcagaaggattgaatcccgtggagcatctggagggagacggacgtacctttaccatcgagatggaaacaggtacgggtaagacctatacctacatcaagaccatgtatgagctgaacgcccgttatggctggtcgaaatttgtgattgtagtgcccagtattgccatccgcgaaggcgtgttcaagagttttgaaagtatggcagagcactttgctggagaatatggtaagcgcatgcaatacttcatctacaactcgaagcagctcgctaagattgatgcctttgcttcggataacggcattcatgcaatgattatcaatacgcaggctttcaatgcttcgcttaacgaggataaaaacaaggaaggtcgcgcaggtgattccgcagcccgtatcatcttctcacgccgtgatgagttcggttcgcgaaagcctattgacatcttggcaaaaacgaatcccatcctaattattgacgagccgcaaagcgtgttgggtacggacaaaggcaatgccacacgaaaaggtatcaaactgtttaatccgctctttaccttactttatagtgccacgcaccgtgaaatattcaaccaagtatatcgcctcgatgccatcgacgcttacaacaagaagctggtgaaaaaaatagaggtacgcagtgtgcatcaagtgggttctacagctaccaatagctatgtctatctggatgaaatcgtcattagcaaaggcaatccacaagctcgattgggcttcgatgtcaagactgccaatggcacacgccagaccattcgcttggtcggcgaagggttcgatcttaaagagcaaagcggtggtttgcaggagtatgccaataactttaaagtggaatgtatagacggattgaccaataccgtgcattttctcaacggactgacgcttcatcccggtgaggtggtgggcagtgtgaatgaggatattctccgtcgccaccagatacgtgaaaccatcaagactcatttggaacgtgaacgccaactttttgctcgcggcatcaaggtgctttcgctcttctttatcgatcatgtggatagttaccgcatctacggtaaggacacggcagagaaggggaaatttgcacggatgtttgaagaggaataccaacgtgccttgcaagagcttatgtctacctttaaggataccgcctacactcgcttcctttccaatccgaagaatgcgcccgaaaacattcacgatggttacttctctatcgataaaaaagggaagaacgtggaatcgaagaataaggaaggcgaaaacgaagaacgtggtttcgaccttatcatgaaggataaggagcgcttacttagccaaagttgccccattcgcttcatcttctctcactcggccttgaaggaaggttgggacaatcctaatgtgttccagatttgtacgttgaaagacacctccaacgaaatcaagaaacgtcaggaggtgggtcgtggtatgcgcctatgcgtcaacgataagggcgaacgtcaagatgccgacgtattgggtgaccatgtgttcgacaccaatatcctgaccgttattgccagcgagagctatgacgactttgccaagaagctgcaaaccgatatggcagaagcctgtgccagccgtccggtagtggtgacagccacactgtttgccgaccaactggcacagacacaagatggacacagcataaagattacgaccgaacaagccgtggaaatccacgaagaactgatagtccaaggttacatcaagaagggcaagctcacgcaaaagtactttgacgaaaagaaagccgattcgctccagtttggtgaggtggaaaatctacattcgtttatcatcaaacagttggataaagtgttcaatcccgatgccttcaaaccagccaatggacgtaataaaacggaggctcacttagttaaagacaacttcaacaaaaaagagtggcaagagttgtggcggcgcattaatacacgtacctactataacgtgagttttgaaacgccaaaactcatcaagagtgccattgatgcactcgacaagcacctgaatgtgacagaaatccgtattgtagtggagagtggcggcatggaaagcatccgtgaccgcgaagaattggaagccggagcagccatgagtgccgctacagtgaaaaccattcgggtaacggaagttattggagcagaagtaacttacgacttggtaggtgaactcgtgcaatccaccggtctaactcgccgcaccattgtagaaatgctgaaaggcgttaatcctgcgactttccatcagttcaagctgaatccagaagagttcatcatcaaagccggtcgcatcatcaacgattgtaaggctatctcgctcatccaacacattcagtatgagaaatgtgctggaacttttggtactggcatctttgaggaagctacgctgcgtggtacacttggcaagaatgctatcgaaagtaccaagtcgctttacgatcttgtagtggtagatagtgaaggtatcgaaaagagttttgccgagtcgctggaagctgaggatgatgtggtggtatatagcaaactgcccggtggattctacatcaacactccgatgggcaaatataatcccgactgggctgtagcttttcgagaagattccgtgaagcacgtctatttcgtggcagaaaccaaaggcaacgacatcgaagtatcacaacttcgccgtgccgaggatgccaagatagagtgcgcccgtcgccattttgcagctatcagcactggcgatgtggcgtatagtgtggtgaaaacctaccaggatttgtataatgcagtaacaaagtaaaatcagccaaacacgtagagaggcacattctctctatgtgtgcattctttcttttcactggcataaactctaaatgatgtcatattgcaaagaatagcttatagtaactatcttgtagagaccggaagatataggtgccttcattatcagaagtttgcgtgtatagcttgtagagattatcaccttattcttcttatttcagctttatttccccttcttcttgtagagatgttgtttttgtaattgtttgtattttagtgatttatgtaaattggttgtagatgccattttcttgttttcccttgtttcccaccctaactttgcaacatcgaatttgagaaaagcagacggctgaatcgttgaggcctcacgatgaaaacttctgcttctcgggtgagacaagagaaaccggatatacattattaattaatcatttaaaacattacgattatggcattttttaaaagagttcagaaaaaagtaaacgatttgtggtatcctcaatcagtaacctggggcaaggcggttactacccgtgaagtggcagacgagctgtctgttctttctaccgtgacccgtggtgacacgtatgcggtgatggagaacttgggacgtgtattgagcaatttcatggggcagggacgtactgtgaagataaacggtgtaggcaccttctactatactgccacctctactaaaagaggagtgccgacggctgcggaggtaagcgcttcgctgattaacggagtacgtgtccgttttttgcccgaagtggagcgtaatagtggccgtcaggtgattacccgcagcatggtgaatacgaagattgtttgggaagagtggggcaagcttccttcttctgacagtggcaatcaaggtggcagcaaccagggcggcaacgacggcgatcagggagagaacccgctgggctgatttttcccatcccgccaattgcctcttttcttgacataaatggggtattatacacttcccgtaccacctctccggtagtgcgggaagtgacgttttagcatcttttattattttttaccacctttctttaacggataatcgctaatttcgaacgattttttttaaatcctacggaataactaataatttataatatggaaaacttgaacatagcacttctgctaatggtggtaggtatggcaacagtctttgctatcctgctgattgttatctacttaggaaaatgtctcattgcacttgtgaacaaatatgcacccgaagaagtggtaccggccaaagctgcagcaaatggtcctgcacctgtccccggtaatattctggcagctatcagtgcagccgtaacagtagtgacacaaggtaagggtaaagttgctaaggtagaaaaaatctgaaataataatcttatataaaaacacaccgaataatttagtatgaaaaaggaaattaagttcagcttggtattcagggacatgtggcagagtgccggaaaatatgtaccccgtgttgaccagctggtgaaagtagctcccgctatcattgagatgggttgttttgcgcgcgtggaaaccaatggcggaggttttgaacaagtaaatctgctgtttggggagaatccgaataaagccgtgcgcgaatggacgaagccgttccacgaagccggtatccagactcacatgttggaccgtgccttgaatggcctccgcatgagtcccgtgcccgccgatgtacgcaagctgttctataaggtgaagaaagcgcaaggtacggacatcacgcgtactttttgcggtctgaacgatactcgcaatatcattccttccattggttatgcacacgatgccggaatgatttcccaatgttcgctctgcatcacccattcacctatccataccgtagaatactacacgaacatggctttgaagcttatcaaggctggtgccgatgaaatttgcatcaaggatatggcaggcatcggacgtccggtttccctgggtaagattgtggccaatatcaaggcggcacatcccgatattcctatccagtaccatagtcatgcggggcccggcttcaatatggcaagcattcttgaagtgtgcgaggcaggttgcgactatattgatgtaggtatggaaccgctttcatggggtacaggacatgcagacctgctcagcgtgcaggctatgctgaaagatgcaggcttccaggtgcccgaaatcaacatggaggcatatatgaaggtacgtgccctcatccaggaatttatggatgatttccttggcttgtacatcagcccgcgtaaccgtttgatgaactccctgctgattggtcctggacttccgggcggcatgatgggcagtttgatggcagacctggagtccaatttggaatccattaacaaatataaggcaaaacgcaacctgcccttcatgaagcaggatgaattgctcatcaagttgttcaacgaagtggcatacgtctggccgcgtgtaggttatccgccattggtgactccgtttagccagtatgtcaagaatctctccatgatgaacgtcattgctatggagaagggcaaggaacgttggggcatgattgccgatgatatttgggatatgctgctgggcaaagccggtaagttgccgggtgaattggctcctgagcttattgagaaagcagagcgcgaaggacgtaaattcttcaccggcaatccgcaagacaactatcccgatgctttggacaagtaccgcaagctgatgaaggaaaacaaatgggaattgggcgaggacgacgaagagcttttcgaatacgccatgcacccggctcaatacgaggcttacaagagtggcaaggccaagcaggacttcctggaggatgtggagaaacgccgtgctgaacgtgacaaatctccgctggacgatgccaaacccaagacgctcaccgtgcaggtggacggtcaggcctaccgcgtaacggtggcttatggtgacattgacctgcccgcttcggctaccgagaaggtgactgctcctcccgtaggcgaaggtcaggatattccggctccgctcgaaggcaagttcttcttgacgaagaatgcacaagaaaccccgttgaaagtgggtgacaaggtgaagagtggcgatcttctctgctatatcgaagctatgaagacatacaatgccatccgtgcagactttgatggaacggttgttgccatctgtgtcaatccgggtgactctgtttctgaagatgatgtattaatgaagataggataatggaagatatatttgcaaaactctatgatatgacggccttcagcaatatcattgctgatccgtcgttcctcgtgatgtatgccatcgcttttatcctgctttatttgggcatcaagaagcactatgaaccattgttgctggtacccatcgctttcggtgtactcatcgccaactttcctggcggcgagatgggtgtgattcaggcggatgaaaacggaatggtcatggtaggcggggtgatgaagaatatctgggagatgccgttgcacgaaatagcgcacgaccttggactgatgaacttcatctattatatgctgattaagaccggattcctgccacctgtcatctttatgggggtgggtgcgctgacggacttcggtccgatgctccgtaacttgcgtctctccatattcggtgcggctgcgcagttaggtattttcaccgtactgctttgtgctgtgatgatagggttcactccgcaggaagcgggtgcgttgggcattatcggtggtgccgatggccctacggctatctttactaccatcaagctggctccccatctgttgggaccgattgccattgctgcttattcttatatggcgctggtaccggtcatcattccgatggtggtgaagttgttctgtaccaagaaggaattgatgattaacatgaaggagcaggagaagctgtatccttcgaaaatcgagattaagaatctgcgtgtattgaagattatcttcccgattgcagtgactacgattgttgctttatttgtgcctacggcagtacctttgattggtatgttgatgttcggtaatttgattaaggaaatcggttctgatacaagccgcttgttcgacgctgctgctaatagtatcatgaatgcagctaccatctttttaggattgagcgttggcgccacgatgactagtgaggcattcctgaattggacaaccatcggtattgtgattggcggtttcctggcatttgcattgtccattacgggaggtattttctttgtgaagctgttcaacctattcagcaagaagaagatcaatccactgattggtgctaccggcctgagtgccgtgcccatggcaagccgcgtctgcaatgagattgcaacgaaatatgacccgaaaaaccatgtgctgaattactgtatgtccagtaatatctccggtgtaatcgggtcggctgttgcggctggtgtattgatttcattcttgggataaacctggtcagtaggggaaagataaagaaactccggcatggctttacaaagccatgccggagtttctttatctttttcgttgaggggcatttcattcgctgaccactttccaatattcagctaccgccatcttttccgcgagatacgcatcaatcaggttggtgtgtgcttgtgtccatgagagttgtgcggacagtacatctaccatgctggcttttccttcattataagagaaggtgacaaggtctagattctcttcggcaagtgtcatattctcccgggccgtcttgacttgctgttcagtttccgttagctttgtggtggctgcggagagctcttccagaatattgtccgttacatagctttgttgcagcttctgtatgccgatataggctttctgttggcggtttgtcttgaagcgggctccccaacggaagatggggatgctgacgttgacccctgcgacgggagtatgaggtacattctgccccatataggcgattcccgtatcccaaccggtagcgagaaacatgctggcttgtggattgtagcggctgagggcggcatgccgttgcgcttcactgcgggcgatgttcacggaggtactggcatattctgcccggcggggcagcacatcatccaggcccaaagggatgatgggggcagtcggtatatctatttcggctatgctgtctatgggagcgtccggttccgagcccataaggatattcagtttttgcagggcaagggtatggttttggcgtgccttgatgtactgtaattcggcctccttacgccgggtggaaatcatcagcaagtctgtgcggctgatggcgccgtcatcgaagcggtcttggatgatgtcgtactgctgttgtacaatatcctgaaaggtagccgcggctttcagaccggcacgggcggcagaggcattccaatagacggcgtcactttgatagtgtatctggtcgagggtcagttctgtggttagttgctccagtgcctcttcggtttgcgccactttcttttgggctattagggaacctccggtataaagcggctgcgtcaaggtggcaagtgcctgataggtataagggcggtagtctcctttcggactgttccattggtccagatgattgagattggcggtaccctcggcgatgatgtcaatctggggcaggaaaccggtggaggcaatcttgcgtgcctcggtactggcgaatgttttcagatgctgttgtttcagaatctggctgtatgcttctaccttgtcgcggtattcttcgcggctcagatatgcttgttgtgccccggcattcagtccggagcacagtaatgatagaataagtatctttgttttcatcattcaattggtaaactgtaaattgttgaatgttctctcacttgattttatgaatggcgcaataagccaccggcagcacgaataatgtcaatgccgaggctaccagcaaaccacccataatggttgccgccatgccgccgaacatggcgtcgaacaataacggcaacattcccaggatagtggtacccgatgccatagccaccgggacaatacgggtggtcgttgcactgataacggcttcacgcggtgctttcccggcagcggtttccgtatcaatctggtccaccagcacgatggcattcttgatattcattccaatcagccccagcaagccgaggatggagaaaaagtcgaatgattttcccaataccaccagtcccagtacaatacctataaagataagcggcagcatcagcaggataacaatcggtttccggtagctgcggaacagaaacagcaaggtgacgaacataaggaagaatgtcagcggcaggttagctgccagtgcggcattgctttctgcctggctttcctgctctccgaagtatttcatggtgtaaccttcgggcacttcaatctccttctgcacttgcttccatatacggttgaaggcggcaatggcattcacaccgcggcgtgggtcggcctgcgccatcatcaccatctgccggttgtagtctttcacattggagaacttgtactggaagtcgaaccggctgacgacttgttccagagtggttgtttcgcgtgcagtgccgaatacggggagtgtacgcaagtcgttaatacggaaagagtcgatggttttatccttcaacagaatggggagtacttggtctccttccctgtattctccaagtgtcatgccgttcgtaccgatctggatactctgtgccatgctttgacgggagatacccaacggttgtgcacgttcctgactgtaaatgggatgccataccggtatcttattgccccaggagttgcgcacgttgataagttcgtcgttacggtgcatgatgtccagaatcttgttggtcagcatgaccagcgtatccgtgttattgccgatgaacccgatttcaatggcggcatctacggcaggggagagcttgaacaacatggtacgggtgatggcattgggatagttggccttcatgtaggcatcaaggttcttttcctgttccttggtatatttgctgtccgttacttccaccaggatattggcgaagttaggtttggggccgacggaagtggaggccagatagtaacgcaacggtgtgctgccgaatgtgacggatacccgtttcacttccggctgctgcatcagatgggcttccacctttttcatttcggtttctacttcgcggatgctgtacccgtccggatagaatacatctgcccgaaagtagggtttgtccagagaagggaagaagttctggggcatcagtcccatgacgaaaagggagaggatgaacagtgctgtaatgctgccaagggtcaacgccttcttgcgtatcagtgtgccgaggatggaggcgaatttatggtagaaaggcttgtcgtatgggtctttaccaccatcttttgcctttgctttcagtatgaagttgccgaatgtagtggtttgtgtcaacgccagcacccaacttaatcccagggaaatggccagcactacgaatagcggtttcacgatttcggctacggaagagggagccagatacagtggcaggaacgaacagatggcaatgaacgttgctcccagtaatccccattggggactggtggcaccgtctatcagcgctttccggcggtcgatgccgcgggcaatggcaatctgggcattatctgtcaccacgatggcattgtccaccagcattcccatggctatgataaatccggcgagggaggtccggttcagacctacgccaagaaacgacataatgagcagtgtgcctccgatagagaatataagggaagagccaatcagtactcctgcacgcatgcccatcaccagcatgatgattacaatcacaatcaggatggattctatcagattgatgatgaacccgttgttggcttcttgggcaatcacgttttcgggatacagactttccagttccagccccacggggatgaggggcatgagttcggcaagcctccggtctaccagttcaccggtttttaccacatcctttgtagggtctgtggagatgccgataccgatggcgcgctttccgttgacgtgcatgatattgccgggaggttccatgtatcccttttcaatgatggcgatgtcgcctagcttgacttgtccgccggaggtagtgataacctggttgcggatatcatcgacagtcgtgtaggtaccgttggccacgatgcgtaactgttgttctccagcactgatttcacccgtattgataatctggttctgcgattgcagcaggctggccagctgcttgggggcgatacccattcctgccagcttgtttacggagatgaatatatggatgacctctgtctgtgtaccgaaaagggctaccttcatcacaccgtctgccgtgatgacttgtgtcttgattcgttccgcccagtttctcatttcttcataagagaaaccgtcgtcacccaccaggccgtaatagatgccgaaaacgtctccaaaatcatccgagacggtcggcacagaagagcctgcgggcagttggggctgtatgttgagcactttgcgccgcagttcgtcccacttctgcggaatggatgcggcagagagtgacggttgcagttcgaaggttatcttggagagtccgtacatagactctgactttatcttgtagacgccgctcatcgactgtatttctcgggagatgggttcggtgacgagccgttccacttctgccggctccgctcccgggtagcgtgtcatgatgactgccgacttgatgacgaaaggtgcgtcttccttctttcccaacctgccgaatgacagtatgccgccgataagcagcacagccagaaagaagtagactatcttcgtgttgtctaatgaatatttggctagattcatgttgtttaattatcaattatcaatttttaccttttctccttctgtcagctggtatactccggccgtcacaacggtttctcccggttccagccctttagagataagcaggtttgcctctcccgttggagaataaacgctcacttcgcgacggctgactttattaccttccaccacccatacatacgttttctggttttcactgttaccgaatacggcacttaacggtacattcatcagcttttcttccaggaagggagtgacatccgatgccagctttattttgcatgtgaatcccggttttacgtcataacgtgcacggtcaaagtgcgggtcgtcaattgttattgtcaccggaatacccgtccctgctgtggagatgtcaagatactcttccagtctggcatcgaaagcctctgcggggtagctatcgaacaccaccttgaactttacgtccttggcacggagcagatagagataatcatccggtacggtgaacttgactcgtagtttctgtgtatttaccagtagtacaaccccttctcccgcattgacacgctgatagttctctaccagccgtttttcgatggaaccgtcgaaaggggctgtcagccgcgtatcccgtatattgttgccggacaactcgtaggcggattttgctttctgatagttggctacgctgatttcgtattcctgcacggagatagcctggcggctaagtagccgtttgttacgttccacttgtgcggcagctgtttcgtaggcagctttgtcggctgcatattgcagggagatgtcgcgtgggtcgatggcggcaatcagttgccccttctttacccgctgtccctctacaaccgggaggttgatgatttgtccgctgacgcggaaggcaagtctcacatattccacggcttccaccattccggagaagtctttgtggataaccgactgtgaactgacttgtgcagtcttcaccggtcggataagggtattgctacccttttgtttttgcccgcacgacgtgatgagcaacgtcgtgaccagggcgaaaagaaacatttttttcattggtaaacaagtatatagttattcgttcaggtatatataaaaacataaaaccgggaaaacaaccaaatgttctcccggttataggataaatgatgatttaatgtgccaatatggttaattacatgagcacattaatttttaattccgtcccccgttccagcgtatatgggtgtccgtagacttgtatgtccactttgctgcctgctgtaagcgagatttcgatttcttttcctacccgtatgtgaagtgtgtttttcagataattcaccttgaatgaatagctgtcccatttttgcggtatgacgggggagaaacacaatgtctccttcagcacctgcatacctgcaaatccgcgtacaatggccagccagctgccgggcatactggttatgtgcagaccttggtccgcttcgttgttgtagtcgtccaggtcaagccgcgtggcatgcaggaaaagctggtaagctttttccactttgccgatgcgtgcagccaggatggaatggatgtggggagaaagggaggattcgtgtacggtcatcggctcatagaactcgaaattgcggcggacggtttccgtgtcgaaatagaaataataaaggtaaagtccgagcaacacgtcgctttgcttgatgtagcaagagcgcagaatgcgatcccatgaccaatgttggttgatggggcgttcttcggcaggaatgttatctgtactttccagtactttatccatatagccgtcattctggataaaaattccccgttccttgtcttccggcagatacatgtgttcgatgatgtctctccaccgggcgctttcctttacttggtcgagattggtgatgcggcgtatgcgggcatattcgtccggatattgctgtgctatcatttccagaaaacggagggtcatcttgaggcattgtatgcaggaatagttggtgtaccagttgttgtccacattgttttcgtattcatccgggccggtaactcccagtatgacatatttctgtttgggttgggagaaggatacccgttggctccagaagcggctgacggcaatcataacttccaggccatattgggcgatatagtccatattacccgtcagtactgcatgctgaacgatggcataaacaatgatattgttgcgatggatttcctcgaaggttatttcccattcgctgtggcattcctctccgttgttggttacctgcggaaacaacgctgcaccgtccttgaaacccagtttgcgggcgttttctatggccttgggaagctggttgtgccggtatgccagcaagttctttgcaatctctttgggagtggagagcagaaaaaacggtacacaacacaattccgtgttccaataggtattgccgccatatttttctccggtgaatcctttggggccgatgttcaggcgcgggtcatctccccggtaagtctgatacagctggaatatgttgtaccggataccttgctgtgcttccgggtccccttcgatgacgacatccgtttcgtcccagatttcctgccaggcccttcgatgctcttctaccagcgtattccagcctatgttcttggcttcgcgtgcctcggtcatggagtgctccaccaattcactccgttcgtggtaaagagaagaagcgatggcggtgtatttgatgagtgtcacgttgtctccgggttttacgtcggcacctacgctgaaaccggtctgcttttccttttctatccgtatgggattggcagtggtttccttgttgtttttgaagaattggtaagtcatggcgtagcacacttgtgcatcttcccggcgggtctgtgtccagaggtaggcacagtcgctggtagaaccggaacgcaggatgttccatattttcaggttcggcaggtcggcatcgtccacgatattcccgtcaaggatgggcacgagtgagattctaccggtatagttgatggaggacacactgtacttgatgagacagaggttgggtcttgccatatccgtgatgtgctctatatggatgcggagctggtttccccggggagaggtcacctccatgtcccggtaggagataccctctttcatgtcgaggcggcggttgaagctgtcgacatcccagcctgccaaatcgagttcctcatcgatgaggcgcaggttgatacggctccagtcggcagccttgggtatgcgggtgtaatatgggggaaatccgttcttccaccatcctacgcgggttttgtccaggaaagtgatgccggccacaaatgaaccacggtaactgtcactgctgtaaggctcctcaaaatacccccgttgcccgaaacgtccgtttccgagactgaatatactttccgacatccgttgacggtcggggtggaattggtcttcgatgatattccattcatcggtcttgaggtatttcttcatgacgacgtgttttctgtagttatcgccgtaaagttaagcaatatgcggaaataaagaagaaaagtaaggacaaaaataaagaaaggcaaggaaagacatcaaaaagacaccgggaaagtatcgttccttggtaccgaacgatgctttccccggtgtcaggtggaatgttgcccggtgtcggtcaatatttccgtctcagagtacttcgggggtgattcttagtttgctttctctcctttggtctctttgattaaatatacacagaaagcaccgattatcagcatgactcctgctaacacaagcatattgatttcaggaggcagtcctcctttgggagtaaacaaggcaaggatgatgccgcccaaggctgccgctataatctgcgggatacagatagttccgttgaaaagtcccagataagtacccatgtgtcctccgctcagtgcgttggttaggatggtgaacggcagtgccagcatggcagcccatgcgcaccctatcagcaagaaggaaatgaagagcatataagggtcgtgtatgaagtaggtggaaatgaaacctatacctcccagaacaaggctgagtgagtagacgcagcggcggtccttgaacatcggtatgcagatggcccaaagcacagagccgatggcttgcacggcaaacagtacgcctacccagtcggcggcattctgatattgcaggctcttggtgtcgagtactattttggtcacaccatctaccaggtgctctactgtaggagcgtcgaaagcattggcagcgatgctgccgttggtataagtccacatgaacataaaggcaaaccagcagaagaactgtaccagtccgatagtccagaatgctttcggagcgttgataagcagcttcagcatgttggtcttttcatgttcctcttcttcggtgatgccgtgatactctgcatattcggcaggcggcatctcttttactttgatcgaagtgtagatgacgcagaagataaggatggccgctccgatgtagaatgagtaaataaccgaggcggggattactccttggggagctgtattgctgatgccaatccatgcaaagatgaacgggaagagataacccaccaggctacctgcattgcatagaaaactctggatggagtaggcgagtcctttttgtttctcattcaccatgtcgcccaccatcattttgaagggctgcatggccatattgatggaggtatcaaggaacatcagcgataccagaccgaaaatcatggctgtacttactgccatgccgaagcttccggcattgggtagcaggcacatgacgagtacggccaccaacgaacctataaacagataaggaatgcgccgtccgaagcgtgtccaggtcttgtcactggcggctcccacaatgggttgtacaatgatacctgccaacggcggcaggatccagaaataactcaaattatgcgggtctgcacccaaagtggaaaagatacggctgatgtttgcactctgcaaagcatatgcaatctgcacgccgaaaaaaccaaagctgatgttccacagcttccagaaacttaaatcgggttttactttcatgatggttcaatatgttttattatttcgttgttcctcttatcaccagattggtacgtactatcttgttgttgcttttctcttctccctccagctttccgattagaatgctgaaagcgcttttacctacttcctcgccatgttgctccacagtagtcagcttcgggtcggtgctttgggcaatggctccgtcggtgaatccgcagatggatacttcatcgggaacttttatgccgaccagtttgcaggcatacagtatgcctgaagctgtctcgtcgttgatggcgaagaaaccgtcagggcggttttcgctttccaataggtcgggagtgatggagatggcgcgttcacgggtgtcgcacaacagaatcatgctgtcgtccactggaattttatacttcttcatggcatccaggtagccgttccggcgattcttggtaatctccaggtggggagccgcactatagaaaagaatacgcttgcatccggtctgtatcatgtattccacggccgcaaaggagccggcatagtcgtccaccaccactcgctcggttttcaaccccgtacatatacggtcgtaaaagacgatgggaatgtcgttgttcagcagctcctgataatggtcgtatttggaagtatccttggcaagtgaagcgatgactccgcagacacgggcggcaaggaaagaatgcacaatcttcacttcctgctcgtacgattcgctgctctgcgccactatgatattatatccggcatccgccgctgctttctcaattccactcaatacgcaggaaaagaagtggtgtaccagttggggaacaatgacgccgatggtattgctgcggcttgcgcggaggtttacagccagtacattgggcttatagctatgttcgcgcgcataggcatggacaagatcacgagtttccttgctgatgtccggattgtctttcagcgctcttgacacggtagaaggggagacattcagcgcccgggcaatatccttgatggtaatctgcggtttattcatggtatagttttgaggacaaagataaggtaaacttccctaatccgattgcaaaaataacgtaatatggtaaattgggcttattcgttgaggtttatcgggttgtaagtttgtgcaaacgattgcagacacccgtattttgacaaatagaggtgatatatagttctatattccctaaatgcttatatttgcagtatgcaattaatgatgataacgccatgaaacacatgaagttcttgactttctttttttgtattgcctttgccgtatttgcatgcagcagcaataatgagacagaccccaacgccggtggacttcccgataaggaggaacctctggttacggactttgctaaaggtgccgacatcagttgggtgacggagatggaacataagggtatgaaattttacaatacctccggtgtggagaccgattgtttccagctgatgaaggatttgggcctgaatgcggttcgactcagagtatgggtcaatcccaaagaacacgataactggtgcaatacggccgatttggtgacgaaagccaagcgtgccgcagagctgggcatggacgtaatggtagacttccattacagtgactggtgggccgaccctggacagcagcataagcctgctgcatggaaaggactgaacttggtcgacttgaagaaagccatcgccgaccatactgccgatgtacttaatgcgctgaaagcggcaggagttactcccaagtgggttcaggtaggtaatgaaatccgtccggggatgctttgggatgaagatgctgcattgagtggtgcgtcctatgatgtgagggaatgtgatgtaaagggttccaacagcacttccgagaaagtgaaataccgtgagaactttgccaacctggctgcttttatcaatgtaggatacgatgcggtaaagtccgtcttcgacgatgccattgtcatcgtccatctggacaatggatatgacaacgaattgtatacctggttctttaatgaactgaaagccaatggcggtaagtgggatatgataggcatgtcgctctatccttactggacgatgctcgagcacaaggaatatacagctgatagaactatcaccgagtgtattgccaatattaatagtgtagcccggaaatacaactgtgacgtgatggtggtggaaaccggcatggagtgtgctgacgacaaagggaatctggcaagtgcttccgtgctggcagaagggaaacgccaactggcacgtatcctgaaagagtgcaaggagaataccggtggacgctgcaagggcgtgttctactgggaaccggaatgcaggccgaaccaatatcggctgggggcattcactgaagacggccgccccactgtgataatggatgcttttaaataattatattaacaaaatcttttaaagaagaatgagaaagacaatacttatcttttcctgctgcgccttttttgccttggcggcaatggcgcagcgtacagaagcattgttggaaaagaactggaagttcaccaagggagatgttcccgaagcaacacaaacaaatttcgacgacagtaagtgggaaacagtgaccattcctcatgattgggccatctttggtccgttcgaccgcaacaacgatttgcaggaggtagcggttacgcaagaccttgaaaaacaagcttccgtaaagaccgggcgtaccggagggttgccttatgtgggtgtcggttggtatcgtacggcttttgatgcttctgcagacaaacaggtcactctggttttcgatggtgctatgagtgaggctcgggtctatgtcaatgggaaagaagcttgtttctggcctttcggatataactcttttcattgcgatgttaccggtttgctgaatgccgacggtaaaaacaatgtgctggctgtccgtctggaaaacagaccccagtcctcccgttggtatccgggggcgggattgtatcgcaatgtccgcctggttactacggaacgtgtccatgttccggtttggggtacacagctcaccacaccgcatgtttctgctgaatacgcttccgtgcgtctgcgtactacaatacggaatgccggtgatgcggatgttcgtatttctactgatattattgcgccggacggtaagatagtagcccgtaaggataatagccggaaaattaatcacggacagccatttgagcagaattttctgataaatgctccgtctctgtggtctcctgagacaccttatttatataaggcagtatctaagatttatgtagatggcaaacagactgacgaatataccacgcgttttggtatccgcagcattgagattatagctgataagggattcttcctgaatggtaagcaccgtaaattccagggggtatgcaatcaccacgatttgggcccgttgggtgcggctgtcaatgtggctgctcttcgccgtcagttgacattattgaaggatatgggatgtgatgcagtccgtacctcccacaatatgcctgcacccgaattggtggaactctgtgacgagatgggctttatgatgatgttggaacctttcgatgaatgggatattgccaaatgtgagaatggttatcaccgctatttcaacgaatgggcagaaaaggatatggtaaatatgctgcatcagtatcggaacaatccttgtgtggtaatgtggagtataggaaatgaggttcctacccaatgtagtcccgagggctacaaagtggcttctttcctgcaggatatttgccatcgcgaagaccctacacgccccgttacttgcggtatggaccaggtgacttgcgtgcttgccaacgggtttgcggcaatgattgatgtacccggtcttaattatcgggctcaccgttatgtggagtcttatgagactcttccacagaatattgtgcttggttcggagacggcttccactgtaagttctcgtggtgtctataaatttcccgtacagaagggagctagtgtgatgtatgatgaccatcagtgttccggttatgatgtggagtgttgttcctggtcgaatcttcccgatgaggattttgctttggctgatgattatgactggacaatcggacagttcgtctggacgggctttgattatttgggtgagccttctccttatagtacggattcctggcccagccacagctccgttttcggtatcatagacttggcaagcctccccaaagaccgtttctatctgtaccgcagcctatggaacaagcaggcaaataccttgcatgtccttccgcactggacgtggccgggcagggaaggggagaatactccggtttttgtttacaccagctatcccagtgccgaactgttcgtcaacggaaagagttatggcaaacaacggaaacttactgctgatgaaagccgtgctttggaaggtcaggactcccttgctttgcagcgtcgctatcgcttgatgtggatggatgttccttatgaaccgggcgaagtgaaagtggtggcttatgatgcttccggtaagcctgcagaagaaaagatgattcgtaccgctggcaagccccatcacctggagctggttgccgaccgcacccgcttgtctgccgatggtaaggacctggcatatatcacagtccgtgtcgtggataaggacggtaatctttgtccggcagacagccgcatggtaagcttctcggtgaagggtgccggaaaatatcgcgctgctgccaatggagatgctaccagcctcgatttgttccatctgcccaagatgccggctttcagcggtcagctgacggctattgtgcagagtggcgagcaagccggtgagattgtgtttgaggcaagggctaaaggattgaagtccggaaagctggtactttatacttcagagaaataaatagcactatttgcttccactctaccacacctgctctgtaaccctttgttcatcggtgtttgaggtgcggtggaagcaacagaaaaaggtggaagcaaattttgcttccacctctgtttttagggccgacatgatgttaacttgttgtaatgtaataagttaatatcatgtcggccattttgttaatatcgtgttaatggcatattaatattgtgcagacacgttattcatatcctgaaagtatgttgcttggtttatacatgcctggcatttcttcagtaaaagctttgtgtttcttttgttttgtcttgatgttgtgtagtgcttaacggtcgtaaagcgatttgttgacggccgtaaagcgatctgccaacggccatcaacaaatcgcctaacggtcgttaggcggtgaaaatatctgtagttcagtagaataatcatatatgttatgtgcaagaatgctacatgtgtagtggaaagaaacgctgtattatgatatatcaagtgatttccctatcttgtgcaaccgcatgcaatcgtttgcactgttcgtttctcacattttgctctttctttatactttactaaattaataaagcatatttttgttgcgtcatgctttaggtacttgaaagacgttagaaaacaaaagtacgaaaattatttttcgaataatatatataggtaattaatattgttaactttaatttattaaatgcatgaagcaagttaatcttagaatctgtcaaacgattcttaccctaatgttggggttgttcttatcaattggcgcttatgcacagaacattaccgtgaaagggcatgtgaaagatgccacgggattggaagtgattggtgcaaatgtcgtagaaaaaggtgatactacgaatggtacaattactgatttagatggtaattttacgttgactgttcctaaaggcactacattgactgtatcttttattggttataaaactcaggatgtggtggttgactctcctactattatggtaacactgcaggatgatgcagaattattaagtgaagttgtagttattggttatggttctgttaaaaagaatgacttaacaggttctgtaactgccattaaagcagaagaaattaatcgtggtgcgattacttctcctgaccaaatgttgcaaggtaaggttccggggttgttagtgactcccgcgtctggtgaccctacgggaggtgctacaatccgcattcgtggtgcagcttctttgtatgctagcaatgacccgctgattgttattgatggtgttcctattactccggaaggtggtgcaggtatggcgaatccattggcatcggtaaatcccaatgatattgaatcttacaccgtcttgaaagatgcatcagctacggcaatttatggttcacgtgcttccaatggtgtaattattattactactaaaaaaggtagtggcgataaaatgaagatcagctataattcgagttatagtttgaaacaaaacacttctacattggatgtgatgactggagaccagtaccgtaattatgtaaatgaagtttatgcaggcactgaccgtttggctaatatacaatccatgatgggaaccgctaatacagattggcaggacttgatttatcgtacagctttttctaccgatcagaatgtcagcctttatggtagtgtgaaggagaaacttccataccgtgtaagcttgggatatacttatgatgaagccacattgaaagttggtgataaccaacgtgccaacatgtccataagcttgactccgaagttcttccaggatcatttgtctgtaaatcttaatgcaaaaggcatatataatcgtgccaattatcctaattcaggagctattggtgacgctattagttttaccccgactgttgctcctaaaatggaagatggcagctatttcaattggtatgcatctgatggttctgctaatacaatggcaagtattaatcctttgtcgcagatatatgatccttacaatgtgaatgatacatggcgttctatgggaaatatgcagttggattataaaattcatggttttgaggatcttcgtttgaacttgaatctgggatatgacttttcacgtacaactggtaccacttacaatgaattaggctcaattctttccaaaagagctggtgcagccgactattataaagagtatgccaatcagaactccaatacacttttggaattttacggtaattataataaggagtttggtattcaccacttggatgtaatggcaggttattcttggcagcataattatgtgaagtataatcaaactgagtattataataatgaccgttctaaagtttatctgcaaaagccgactgatagacgggagtattacttgctttccttctttgggcgtattaattattctattaattccaaatatttgttcactttctcattgcgcgatgatgcgtcttcacgcttttccaaagataatcgttggggacttttcccttctgcggcttttgcatggaatgtggcagaagaaggtttcctaaaagacaataatttcttctcaagtatgaaacttcgtttggggtggggtaaaactgggcagcaagatataggtatggaccgttgctatgcttatcaagcaaaatataccgaatcttccgctctgactactcaaataccttggggcaatggatacatttacacattggcaccaaatgcatataatcccaatattaagtgggagactactgaaacttataatgttggtttagactttggaatttttggtggccgtattaatggtaatattgatgcttatttgcgtaaaacatatgatttgctgaatgatatcaatactccgatgggctctaacttctctaataaagttatttccaatgttggtgatatgaagaatatgggattagagtttaacttgaacttcattcctattgaaaagaaggatatgcgctggactattaatgtgaacggaacttggcagaagacagagattacaaaactgacgaatacaggcgatgatgactatctgggggttcaggttggtgcaggtatgagtagtattggtggttatacttctctgtatcgtgtggggtatactccttatacttattatctgttccagcaggcttatgatgaaaatggaaaagccattgaaaatacgttagtggaccgtaacggtgatggacagattacagaagatgaccgttatgtgactggtaagagtattttgccgaaattcttcttcggtatcggttctcagttcacttataaaaaatgggactttggttttaatgctcacggatctttaggggggtatgcgctgaataaggttgctaagaataattcgacttcatactcggacgaccatagtaaaggatatatcaataacttgtctacttattgcttgaagactggatggactgaagccttgactgagtaccagcaagtttcagatatgttcctggagaatgcttctttcttccgtctggatgatattaatgtaggttatacttttgataagtttgctcattggaatggaaaaatccgtgtaggagcttctgtacaaaatgtatttaccatcactaaatatagtgggcttgatcctgagcttacagcagcagatggtgtagataacaatttgattccacgtcctcgtctctacaccgtgcgtctgaatattaatttctaaactagagaatgtacatgattatgaaaaagattatatatagcttggcaattgtagcgtctatgttgacgttgaatgcttgtatcggagatttggatacattgccgttaaatgaaacggataagactgctgggcaggcttatcaaacattggaggattttgaaaaaggattagcatatatctatggttcttactctttggttagccagaatgatccgggtagttctgacatagcggtagaagatgccggtcagagcgaattgatacgccagtatgttgtattaaatgagatgtcttgtgatgttctgaagtgtacatggggggatagttatattactgatacacagaataactcatggacttctactcctaatgctgctacgatagcggtgtatacacgctgcatggtgactgtgacccgtgccaatgaattcttgcttcaaagtaaaggttcttctgtagaaggagttgccggtcttcgtgcagaagcgcgttttttgcgtgcgtatgcctattatatgctgatggacttgtatggtaatcctccttttgcccttgaagaaaatattggtggagaactgccttcgcagataggacgcacagccttgttccaatggattgaaagtgaattattggatttggtttccggtagtgatatgccggctgttggtactgttggttatccacgtgtaacgaaaggtacagcccaggctttgttggcgcgtatgtatctaaatgctgaagtatatacaggcacagctcgttgggcagatgctcgttcggcggctgaggctactattggtatgggataccaactatgtaataattatgaagaactctttatgcaggataacagtgaaaacgctaatgctcaaaaagagatgatttttgcaattggttacgatcgtgatagaactcagagttggggggggacaacacatttggtttccggtagtttggatgatgccaatagtgaagctattgcaaaagaactgggatatccggaaggaagccatatcgctcgtgaaagatggaacgggtatcatgtcccgaatgaatttgttgaatattttgaattatctggcgttgagtggggtggttctggtataggatatgatagagctgccagtgataaacgtgcattcttctctaacgtaggttgtgtagaggcatttgataagtcaaaagcagaaacaggatggagatgctggaaattttcaagtcgtgactctcaaggaaacatttactcaagtgatagctatgagaagttctcttccattgatttcccgatgattcgtctggctgaaatgtatctgatttatgcagaggcacaagctcgtctggatggcggaataacaacagattctaaagcattgggatatgttaaggctttacgtgatcgtgcgggagtttctatgccttcgtccattgatttggattttatcttgaaagagcgcgctcgcgaactgatgttggaaggacatcgtcgtacagacttggtccgttatgggtattttacttccatgtcattcccttggccttataagggtggtgtacctgacggaagaactgctttaccatcatatcgtacaatttatccgattttgagtaccgatttgaccgagaatcctaatttggttcagaatcctggttattaatacatcaataagaaactgtaatgataaaactttagcaatatgagactatttaaaaatataatgctgtttgcagcagttgcgacagctctattcacttcgtgtgaaacggatgtggatacacctcaaatcagtactcctgagagctttgttgctcctgtgatcgggcagtgcagtgatgtaattgtaaatgctgataattcagcgaatgagaatgtgatttttacttggacagcagcggatttcgggcttccggtccagattctttattctgtatacttgacttccggtgagaactctgctttattgggaacttcttctacaacttcctatgcaatatctaagggagacttaaatggagttgttataaatagtttgggggttgctgctaatgaaacagccactgtgtctgcttatgtaacagctaaaatgtacggaacagataattatgagcctattgcttctgctgtttccaataattttagtgtaacgacttattctgcaccattgacttccctctatttatgtggtgagtttagtggaagttgggatattaacaacgctccgattttctgggaaacaactggtggttccaatacttatgtctgtatggcagacttctcgaagactgcggcaggagatgatgccacacgctctttctttaaggttgtagcgcagcaggcttggagtggagacaattggggatataatgatttgaaaccttcttggaattgtccggaacaggctgatgctaacttgtcgttaccactttctgaaggtaatatttttgagataactgtaaataagactgtgatgacgattgataagaaagctattggcaataaattaggtctgacaggtgatttcaataattggggtgagggtaatcctgatgcaatctttacttatgactatttaagtagcagttggaagactgagcctattgcattggaagctggtaaatccataaaagtgcgtgttgatggtgcttggaccacaaattggggggcaactggcacaatgagtactgctgttgccggtggatatgaactagaagcaggaaaagataatatcagtgtaccggaaactggtacttatatagttgtgttccacggtaaccgtactccttatgtactggaacttgtgaagcaataataaagttttaatcttcaaaaataaagagatatgataaaatatttaaaatatatgttcatggcagctatcattatgatagctgctacgggatgtcaggaagatattgaggatactttttccaaggaaccggcagctcctgaacttgtgaataatggtactattctgatgaccaagaacacaatgtcagaatctattacatgggcatggtcggctgctcgttttatgaaaggcgaaaccagctacacactttatgcgcagtatggtgatgcaactccagtacaagtaggttcttctactaaaggattgtctttgaccttgacaaagaatgaattcaagacattgttaggaggtgttcaaggcattccggaaaatgcatcttttgatttgtctttctatgtagaggctacagatgagaatggtggatataaatcagcagcacaattgatgactgtttactcgtatggtgatgctgtttctgcggtgcttacagcaaatgcggctgatgtaattcttgacatcacagctcctgcggaaaaattgcagttactgacgtgggaagctgcgcgtttagagtatggcgaggcaatcacttataatgtttatatcacctataatggcggtgaattgactgaagttgcaacagggttaaccgaaacagcttgttctaaaacggtggatgaatggaatgaattggtggtagcttcaggtgcgcctgaagcacaagccgctgatgtggaatttatagtaaaagcttattccgaaacttatccggaaggtattccttcagctcccttgagcattagtattactacttataaggctacttatccagcatatctgttaataagtggaacagataagaagctccctcatagtacagtaactaagggactgtttgactgttttgttaatttggaaagtggtgtctcgtttaagtttattgaccaagatacacaaacagaatatggtagtgatgatgttgagactactactgatgataagggaaatgttgtaacatcaggtactattggtagtggagttataacaatccctgctggtttatatcgtatcagtgcggatatcaaatttggtactcttcagattgttaaaattaattctatgggaatgataggtgctgccacacctaatggatggaatgctgaactgccgatggaatatgatgcaaccgcaaatacttattctgttgttacaacattgactcaagatggagaatataagttccgtgcgaatgacaattggggatttgccattgataagaatggtgacttccgtgatggcggcgataatatggtatttgaaaaggaaaccggtgaatataaggttgtacttgacgtgaatagccatccttatacagcgaaaatattaagtacctcattcccggaaaaactgtatcttcctggagctcaaaactggaatgtaccctttacgttatatttagggggtaatggtgaaggtaaatttgaaggtggcgtcaatatgacaagcaatgagtggaagttctctccggttacagattggggacaagactttgctggtacgatcgaattgaatgaggctggttatgggaagggagtatatggtggctctggtaatattaatactccggcgggctattattatatccaagtggatatgactaccggtacttttgaaatgcagcgcattgataaggttggcttgattggttctttcaatgattggaaagatgatgcagtctttgtatatgatgcagaaaagaatgtatggacgttgtcggatgtgactcttacaactaccgatgagtttaaaattcgttttaatgctgcctgggatatgaaccgtggttgtgaggtggcccttactcctggtactaaaataccagtcaatcaagatggaaataacatgaaggtggctgaagatggtaactatactataacagtagatatgtcaactaatcctaatacaattacggttgtaaaataaagaatttatactgagagatatgaattgaatcggctgtctgaacactacaattaggaatgtcattttgtcgaatatgttattattcaagatagagcaagatgaacgtcgtaatggagtgattagacagccgattctgtgtttatgggtgtattttattaaaatgaatttgcatgaaaatgagatttgtccttgtctgtggattgatattgtcggttgtaacaagtaaagcccagacagcctttgaagaaataagtgctgatcccaataaaagcgccagtgtatattatgcctatcctgaaataagtgaacaatatactcttcctcctgaaggatatacccctttttatatttctcattatgggcggcatggatctcgctatcttatttctgattctgaataccaaacagtaatggaaatattggataaagcagatgctgtaggttttctgacagataaagggaagagtgttcgtagtaggcttgaagtggtttggagagatgcagaggggttgggagggcagcttactcctttgggatatcgacagcatcgtagtatttctgaacgtatgttttataattttccggatgtatttaaaggtaaacggaaaataagtgcttgctccactgttgtaattcgttgcgcattgagtatggctactttttgtgagacccttaaggggttgaatcctgagttacaatttacttatggttcaggtgaacgctatatgcgctatttgaattattggaatgagaatgctcgtgagtttacttcggatgagtctgattggaggaaagattatcatgagttttgtagagagcatattcatccggaaagattgatgagacttttgttttcaaaccaaaattatgtgcaacagcatgtcaatcaggagcagttgatgatgggattatattggattgcatcagatattcagaatacggaattagacttgtccttttatgatatttttgaaaaagaagagttgtttgatatctggcaggtaaataattataagcattatgtttgtaatggaacttgtccttggggaaaggagattgtacaaagaacttttattcctttacttgaaaatatattggattctgcaaatgaagccatacaaaatgatgaaatggctgctacattgagatttggacatgatggaaatgttatgccattgaccggtcttcttcatttggaagggtgttatggagaagaaaccaattctgaaaacttctatagagtatggagtgattataaaattgttcctatggctgctaatgtacaaattattttttatcgaaaaagaggtacggataaaataattgtcaagtttatgttgaatgaaaaagaaacaaccattccaataaagagtgaaatagctccattttatttttggaaagatgttgaaaaattctatcgtgattatattggttacttatatagagatataaaaaaatagattatatatcgtaggtcatgaaaataagaactttatttgttttattcagttttttattgtgtcaatggagtgttgcacaacaaactgtttcatctggaaaactcgtggagtatcctctgttcaaatcggccattgtagctcctcgtgatgtttttgtttggcttccttcagattattctccagaaaacagatacgatgtcatttatatgcatgacggacaaatgctttttgatgctgcttccacttggaataaagtagaatggggagtggatgaggttttgggagaactgttggaagagaaaaagataaggccatgtattgtggttggtattgctaatatcgctcaaagcaggtatgaagattatttcccacaaaaagctttgaaatatctgcctaatggaaacatacctgaaaacattcactttaatgcggacaattatctccgttttttagtagaggaagtcaaaccctttattgataaggagtattcaactaataagggagtagagcatacgtttgtaatgggttccagtatgggtgggttgatttctctgtatgcaatatgtgaatatcctgagatttttggtggagcagcttgcttgtctacccatctcaccatgattatcagtagtacacagcctactaaggagcagactgatttgtggttttctgcttttgaaagttatcttgccgatcatttgccgaaagctaatagcagactgatttatatggataggggagacgcgacattggatgctttttatcctccttatcaagacaaattggataagctgatgaaagaaaaaggatggaccaagcctatgtggatatccaaggtctttccgggagctgcgcatatagaaacggattggatgaagcgtttggaatatccggtgaaatttttgataggaactgagagatgatgatgaaaggaatgtattgtttttgatttataagtatgattcgtaaagtttttaattgtattttgttttgcctgttgtttcttttgttgccattgagtgcgcaggataaaattcaggaggttgccctcgcctatttgcatgatgaggcgatgtcgcctgatgactatctggtagccaaattccggaaggcagatattgtgttattagcagaagaccatggggtgaaagaaaatctggactttgtttgtaatttgatacctaagttatacgagaataatattgtactgggtatggagtttggggcatacgaagatcagcgacggttggattctctaatcaatgctccgaagtatgatgagcaagtggctcgcgaactgatgttcaattataatacccgatgggcgattactgaatatatggaaatttatagggctgcatggaaatggaaccgttcactgcccaaagatgcaaggaaattccggatattgaatatcagttatcattataactggcagaaattctccggagttagaactccggaaaatatgcatgaggtatttccattgggaaatacagaagactttcggtgtggattgctggaacgggaagttctggcgtcaggacagaagatattagtattgaccggaactccccatgcttttactttttatcattttccctactatgattatacgtctccgggttatgtacgttacgaacagaattttcttggaaatttgttgtactctaaatatggatcgaaagtagttgcaatagctttgcatcaacctttcccgaaccgtttaaaccgtcagccggcattactttctcctgctttaggtagattggaggccataatggggaggatggacaataaacctatagggtttgatttaaaaggtacacctttaggtaagttggatgatgatagctattactcaatgggatataatgattttacgttggcagacttatttgacggatatatattccttaagccgattagtggattgtcctcttgtagtatagactataagtttatggatgatactaattggaatgaggctgtcagcaataatccggatccggattggcatcctcgtccccaaaccagggaacaatattgggagatgataaaagatttcgtggatatcagaagacggtatacagatgttcaatagatgtgtttgggaactatgcaaacgttttcgtcctttaactccactttttcattatagtctgtctatcagctattttatcttccttatctttgaatcataataatttgaaaatctaatgatatgaagacaataaagcttctttctttttttttattttgtgtgttatcattctgcttggtagcttgcagtgatgataatggtactacaccaacgccggaaccggagccggagccaacgccgtcagaatggactgtgataactgcaactcctacagattgggatggggagaaacgtgcggacatctcttatcagttactggtctactccttttccgatggcgatggtgacggttatggcgatattaatggcttaatttctaaactggattatatagatgctttgggtgtgaaggctatttggctttctcctattcatccatctccttcgtatcatggctatgatgtgacagattatacgagggtgaatcagaagttcggcacggaaagtgattttgaccgattggttgccgaggctcataatcggggcattaaaatttatctggattatgtcttgaaccatacgagtgtggagcatccgtggtttttggctgcaaaatcttctactgacagtgaatatcgcaattactacatattctctcaagacccggaagctgacatcaaggcgggaaaaattgatatgatttccagtgaagggggaaacggatataattcgggagaatggtattctacgacagcttcaacagatgtcgtaagcggatgttataaatttgtactcgattggtcgaatgcttcaaaacctacggtgacggtgagcgttgcagaaaaggcggatacggataatacagaccagacaactactggtgccaagtatctttattatggtgaccctgctgtttgtaagaaattttatgataagggaaatggtatttatgaattgacagtggacttctcttcaccttggggattcttgattcgtaccagcaatacagattggggcaaccataaatatggtgctgcctctaccagtactcgtctgaaatatggcgaaccttttgctttaaagcaaggtgaggatgcagaagatattatgtttgagtctatgaacctatggtattatcactctcatttctatacagcctcctttgccgaccttaattacggtaaattgtctgatttgaaaagttctccggcattcaaggctgtggtcgcagcagctaagggatggatagaccgtggagtagatggattccgtcttgatgcagtgaaacatatctatcataatgctggaggttcagaaaatccgactttcttgagaactttctatgatgaactgaatgcttattataaacagaagggtaagacggaagacctttacatcgtgggtgaagttctttcgggtgctagtgaagtagccccttattatcaagggcttcccgcactgtttgagtttgacttttggtatcgtttggagtgggccattaataacagtacgggttgttactttgtaaaagatatcatgagctatcaacagctttatgctgctaaccggacagattacatagaagctaccaaactttcgaaccatgatgaagatcgtactgcttccaaactgggtaaatccattgataaggagaaattggcggcagctgtcttactgaccggtccgggcgaaccttatatctattatggtgaagaactgggactctatggaatgaaggacaatggtgacgagtatgtgcgcggtccgatgttgtggggagataatacggtgactgcctatacggataagatagacaagggggtagcttccagcataaagtctgtggtggaacagcagaatgatgaaagttctctgttgaatgtttatattcggtttgccaaactacgtaatacttatccttcattggctgaaggaaagatgtcaaaacatggcatttacaatgaaaataataccactgccggtaagactattgctgcttggtatatgacgaaggatacagagaaaatgttggtaatacataactttggtgtctctgccactgaaattacactgacggataagatagagaaagccgtcggagtaaatggggatattcagcagaagaaggacggtgatgacattatggtaaaaatgggcgcatatagcactgtcgtatttaaaatatcccaataaagccgtttttattcatacatctttatcagcacccgattcagccagttccaacggaaacggaaccagcgtcgggtgctgctttgttttcctccaaagcggagaacgaactcacggtagccatgtttacggaagggaagtcccacatccatgaactctaagtggcggtatccgcgttgtttggcatcatccagtgctttccatacagcaagaatacccggatattgcagggcataagtcttgcgcatgccaccggagaaccacaggtaggcgctatcatctgaataaatgcatgcactgccaccgataatcttctctttataagtgacgatgaagattttgctttgttgcccttttgtcaattggttttcgagatgctgaaagaacttgatgctggggaagtggcgccgtatcttggaagaatatacgtggcgcaacatctgggcaaaacagagaatctcctctttggtacgtgcttcccgcacttgggcaccgtttttgaggcctttctttatttgccggatacgtgacgggctgaaacgctcttccaccttttcgacgctgtgcagtgagttgcgcacccgtagccaattgatggcgatgtattggttggcccggaaagatttgtatccgaacatggcattttccaggttgcggaactcgatgagaaaagaatcgcgcaatgcttcattggtaagcctttgcaacatgtcactgaagatagcctctttgtctgcctcgttgtcgaaatattctcccataccgtacacctcacatcttttgatgatgccggggggaaacatgcggatacttttacgtatggcggcaagcagtttcgcaacgggcttgtcatcttcagatgccacaatgagtatgggggtataccccggagtttcctcgtagattcggaacaactccgtggaatggaaggtgttggtccccggtaggtcaggaaccttgctcccacggtaatatgtagtgagtttgaggggcattgcttgcaaacttaacaaaaaaactgaaatttcggttggcatgggtaggcttttttattaaatttgtcactatagctgaagtcttacataaaaagaatggatatgatttttaagaaaaagaaaacggttctcgaagaacagccgctgtgctactgggaagagtcctcttatatgatggcagtgcctaaggagggtggaatggatttgtcggtacggctttttgagcgcgtggctgctatctctggagtggaattgttgaaaaaacgtttgcctgatgaagacgaaccgggatatatggaagtaggatatgatggcgaagtgtatgaaataggcttctatgaaggtgatttttcaatgcctgatatgtttaatcgtcgggattattatttcactgacgaagaactatatgctattggcagagccgatagggcacttacggtgttcatgaagttcggcgttgacgggcagaagtcctaccatctgcaactgaagattgctgtagctatggtgcccgacctgcttgccattgtggacgaaagtgccgagaaactggtttgtgctcggtgggccactctagctgccgactcggcggtagttcccggaacgagtgttttgtttacggtacatgctgtgactgatgaaggaggcgaggtgtggttgcatacgcacggattgaaccgttgcggtttgtatgaacttgagattctgaaatcagacaaggagaattacaacaaccattattacttgatttccacccttgccagtcatctgctcgataaagacgataggactcccgaaccaggtgctggcgtatatatcggaatgttgaatgaccgtttgccgatagtggccacctacgtttcgtggacaaaggcgctggatgagtaccgaagcctcgctcttggcagtgcggacgaccgtgaggaaggacacaacggccgcacggcacccgtgttcatctatacgagtgaggacgacgagaaaaagggcagactgcggaaggtgtccgaatacgatagcatgtggggtgagaatccactattctttattagtacccgtgagaccaatcgcatgagtgcgttggctcgcgagcgtttcggtcttgtgaaatacatggcaaagaaggacgaaagctctatcttgcttaaaattggcttgaagacagacagtgccgagcaggctgacgaccgcgaacatatttggtttaagctgttggagtttgatggagaacgcttcaagggacagcttatacaagaaccttacgacgtcagccacatgcacgagggtgatgaagcgtggtttacggtagaggatgtgaccgactggataatctatttagaggaattttcggttgctccggataccgcctatctgcttgtctgatacaaaaggaagcggggagaagattgtaagggcttttattcgccattcccggatattttatctaaatttgccttcgctaaacacgaatatgttatggaaagtttcagtgaattgataaaagcccgccgcagcatgcggaagtttacagaagaagaattgacacaagaacaagtcgttactttgatgaaagctgctttgatggcacccacgtcgaagcgtagcaatgcatggcagtttatagtggtagacgagaaggataaattgaaggaattgtcctattgcaaggagcaggcatcgcagtttattgccgatgcggcattggcagtagtggttgttgccgacccgttggcaagcgatgtgtggatagaggatgcctccattgcctccatttacctgcaacttcaggccgaagatatgggactgggaagctgctgggtgcaggtgcgagaacgttttacggcttccggtatgccttcaggcgagtatgtgcacgaggtgctggatattcctttgcagctgcaggtgctcagtgttattgctatcggtcataaggggatggagcgtaagcctttcaatgaagacaatctgcagtgggaaaagatacatatcaataaatacggaggaaagtaacagtgagtgcagcaaaagcaaacaataaccgtgatacgtataaggccactgccatcacactgattgtattcggtattctttatttggtagacaaattggtgcatttctctgcaatcggcttgccgtgggtgatgaataaggataattttctgctgtataccgcagtgatttttttgctgttcaagcatgacaagtcggtgggattggtattgataggcttatggctgatattgaacttcggattgataacggctttgctcggtacgatgtcggcttatctgttgccactggcattgctggtattaggggctattctgtattggttggcaacaagataagtgtatggcgggaagaagtatagaagatacgtctattgcctttatcggtgccggaaatctggctactaatctggcaaaggctctttattggaaagggtttcgtattgtgcaggtctacagtcgtacaaaagaatcagcgcaggaattggcacagacggtggaggcggtatataccacggatctgcaggcggttacgaaggaggcgcagctttatatcgtttcgctgaaggacgcggcttttgtggaattattaccccagattgtttctggaaaggagaatgctttatgggtgcatacagccggcagtattcctatgaatatttggcaggggcatgttgcgcgtcatggagtgctttatccgatgcagactttcagtaagcagcgtgaagtggattttggacagataccgttttttgtggaaggcaactcggaagaggatgtgcggcttctgaaggatattgcctcagccctatcggaaaaagtgtatgaagcaagttctgagcagcgcaaaagtttgcatctggcggctgtgtttacgtgcaattttaccaatcacatgtatgtgttggctgctgaactgctgaaaaagtacgggttgccgttcgaggcaatgctccccttgatagacgagacggcccgtaaggtgcatgagctggaaccgcttgccgcacagacaggaccggctgtgcgctatgatgagaatgtcattgacgagcatctgcggatgcttgccgatgagccgcaaatgctggaactatatcgggagattagcgagaatatacatcggttggcaataagataaccggacgccgatgcttgcctcttttgaacgaatgttttgctgtatataggtatattataatgaacaagaaaaaagtgcaatgagtaccataaactatgatttgaaaaagataaaagcccttgtttttgatgtggacggtgtgctgagtgccaatgttatccctatgagttcagagggtgaacctctgcgtacggtcaacataaaggatggttattccctgcatttagctgctaagcaaggggtgttgctgggtataattacgggtggacgtacagaagcggtccgcaagcgttttacttctttaggttttgaggatggaaatatctatatgggttcttctgttaaaatccatgattaccatgacttccgtgaccgtcatggcttgaaggacgaggaaatattgtatgtaggtgatgatattcccgacttggaggtgatgcgtgagtgtggtttgccgtgttgtcctaaggatgctgtgcctgaggtaaaggctgtggctcgctatatttcgtatgcagaaggcggttatggctgtggtcgcgacattgtggaacaggtattgaaagtgcaagggctttggatggcagatgaaaaagctttcggttggtagttgtttcaatcgttaaattgtaaatcgtcaaatcgtaaatgacatgatgttagataatctgaaaaaatataaggtgattctcgcctccaattctccgcgaaggaaagaattgctggctggtttgggagtggaatatgaagtaagaactttgcccgatgtggatgaatcttatcccgagacattgcggggagcggatattcctctctacatatccagggaaaaggcggatgcctaccgtgatatgatgcatccggacgaattgatgattacggcagataccattgtctggctggatggacaagttctcggaaagcccaagaatagggaagaagccatgcagatgttgcgcgacatgtccggacgtacccatgaagtgtttaccggtgtgtgcatcactactactgagtggcaacgcagttttgcagcggcaacagaagtgcgttttgctaaacttagcgaagaggaaattgcctattatgtggacaaataccaacccatggataaagccggagcttatggtgtacaagagtggattggattcattggggtggaaaacatatccgggagttactataatataatggggctccccgtacagagactgtacagggagttgttggagatctaaaccagatccatcattagagggatatctttttcactgattccttgtctgacaagtgtttctttgtctttaccgaacatttctctaaaaatctcctgcccgccatattccaaagctgctttactgtaaagttctgcagctttttctattttgcccgttctccaagcaacatgtccggcattgagatagtctgccgcgagtggtttggaggtgagtatcttttcgtaatacttcattgcttgctcatacttgccgttgacaaacgaacaccagcctatagcacgccatgctttgatacaattgctttcgatgaaatcaagcttgaagaaatattgcagagcctcttcatatctttccagttcggcaaggcagcttccggcgtagaaaaggacattatggctttccggctggattgcctccactttcttatagtattccagtgcagaggcaaagtcccttatctgccggtagcacgtagcgagatggcggattgtccagacatggtcgggctttagtacatcggctttcaggtaggcgtctatcgcttccttatacctcttttccttttgcaggcaatagccagccttttggaaaatgtctgcatttgcatggttcaaggctatcaattccttataaagctccaatgcttctgccgggtgttctttgcggaagtggaagtcggcgatggtaatcagcagctcgggtttgcacagaatctctttgagtgccgggatacggtgcagggcaatctcttccttgaagatgtcacggaactcgtgtctgcgctggcttaatttgaagaaacggtataagtcgtggacatactggttgctgatgacatccggtcgttcggcatactgccgcaaagcggaggatttgctttcgtccatgagtgcatccagatcctgagaagtcatctggctgagcatcatcgtacgctgtgactgtggtatatgtgccattgtaaagcaaagggaatatttgtcactattgcagaagaaaccggattggaggataagggagaggatggcattgtctccggtaggcttgaatccgaattccttgatgatgctggagtgatgcatgtcgaacggatagaaccagttgtacggttccttaaagaacggataagtcttgagttgtgcaaacgtactcatatagacgtcagcgccttccagctgtaattcgttcatctctcgtatcttgtctcccagtccggaactttcaaaagctttctcccaatctggattaagatcgttttcctcagggttctcttcaaaaccgaatttcatgttgcgcatgatgttcacattcctcatcatttccggaatgatttcttcacgcatcttcttgtctatcttttccgtttcctggctacggagcagctcgatataaatacggttcagttgcttgccgaaactgctgtcttcattgagcagggaaaggcgggctgtcaattcgggataaagcgacagacgggtgggatgaaaaagaagtgcgaaagcgatacctaccaaagcccgttggtttacttgcgtatttgcatgcgttacggcgtccagcaaccatgagaatttacgggtatcaaagcactccatcagactgagcatgacggcactggtgaacaggcacaaatcattgacgggaagcatttctgattccagtaatcctttagcttgctgttcgtcttctgtagaccagtcgctgttgctccatgtggaaagaaaaaggacctgggcggtttgttcgtgccgttgaagtagggcgtccagaccttggttgtccggcatcagctgacaaacggccaagtcatcagggaaagattccaataccttctgtagtgcggcaatattgtattctttggggaggcgttcccggttattgcgcagggaatggtaatagtgcgtggaaactccgtcaaggagagacagacgtgcctggtcagcgacttcccaagtttcggtcagaatttgacgatatagtttctgacgttcaggatcgtcgattccttggcgcatgtattgcagcatatactgataggatgtttgtgcttgttccaaacggttacggagtggccagtcaccgctgttccaaagaaaggcttccagttgggattgcgcttccttcagccgttgctgcttgagtagagcgacaatatgctgatattgctcttgtatggcttgttcgttcataaatcagtatcttttgaggtatgtattctacaaaactacaaaaagaatgccaaaaagttcggaatttctcatttttcatttttagaaacgaacttgcaactgggcttgaagcaggtttgaattctctcctttatggcggttacagtatgtgtattgggcttgcagacggcatttgggatagaaccaatactgtacacctgctacataattggtctgtttatcggaaatagttttatttttgttgaaatagtcataagaggctattacgtcaaatttgggaagcacatgggcagatacggttgcatagtaaccatcacttttaacgtgtccgtcttttccagccaagtattctgtacgtacatctacggattttgttttgatggtagcacctgccgaccagcggtttcgggcgtaattctctcctatggctatatctggattaatggaagaaacggctacggcgcatccttttcctttaacaaaagaaccgccgacggacaaccatttcaatggatgtaccataaggctgcctacaatgtctttttgattgtttttgtcttttaggttgatgccttgtccgttcatgatggcaaggttataagtcatcaaagagttaaacaagtctccataaattagtaatcccatatcacgaccgcttgcagagccatacaagggatcactgccattgataccggccaggtaattgacagcttgagaataacagtttattaattcgacaaagcagggagacattgggttctcaatggtatacatggttttgaactgtccgatacgtgctgtgagttgagggagaaaacggtattccgtgtaggcttccaagattttcccggtattggcaaagctgtacatgaagtaagccgaccatttatcggtgattttaccgcgtgccataaagataactctctttatatcaaaagtattgctggtaccttcgcccgcatcatcgtatgtatatcccacttgggcatagccggagagggaaatgcggtcttttaaagtgttgactacatcattcagacaagcattttgtgctttcaggatgcatgtggctgataaaaggatgcaggatagtagaattcgtctcattattagggataaggatagtataaaaaaggcaacccttttttcaaagagctgcctttggatgttattttacttgtttttattcgttgatagcagcgatacccggaagaatctttccttcgattgcctcaagcaatgcaccaccaccggtagatacgtaagacacgccgcttgccaagccgaacttgttgacacaagctacagagtcaccgccacctacgagtgagaaagcaccgttcttggtagcttctacgatagcttcgcctacagcacgtgaaccgtgagtgaagttctcgaattcgaatacacccgtcggaccgttccaaaggatagtcttggagttcttgatgacatctgcaaagatcttttcagtctcaggaccgatatcaagaccttcccaaccgtcaggaatttcgtcaaccgggcagaacttggtgttggcatcgttggagaaagaatctgcaatcttggcatcaacagctaaaacaaggtttacgcctttttcttttgctttcttcatcaggtcaagagccaaatccagtttgtcatcttcgcagatagaaataccgattttgccgcccatagctttagtgaaagtataagtcataccgccggcaataatcaggttgtctaccttgttcagcaggttttcaatgatctcaatcttagaagaaaccttggaaccacccatgatggcggtaaacggacgttggatatcgttcaaaactttatcaacagcctttacttctttttccatcaggtaaccgaacatcttgttgtccttgtcgaaatatttagcgatcaatgcagtagaagcgtgtgcacggtgagcggtaccgaaagcgtcgtttacatagcaatctgcataagaagccaatttcttggtgaattctttctggctttccttaacagcagctttggcagccttcttttcttcgtctgtagcatcttcagccaaaccgcggggtttgccttcctcttcagcgtagaaacggaggttctcgagcaacaacacttcacccggttgcagagcggcagcctttacggcagcttcttcgcccatgcagtcgttagcaaattgcacctcaacacccaacaactcttcgagatgcttcagaatgtgcttcaaagagaacttgtcagccgggcctttcggacgaccgaggtgagaaccgataattacactgccgccatcggccaaaatcttcttcagtgtaggaagagcggcacgcatacgggtatcatctgtaatgttgaagttttcgtccaagggtacgttgaagtccacacgaacgaatgccttttttccggcaaagttaaattgatcaattgtcataatactctattttatttaaaagtgttattaaattctttttagtgagcgcaaagttagcatttatttcttttttttgctatgaaaccgttgtttattctttgtctttgccgttctctttgctaactttatatttctggcagtaatatttgcacattaattgcaaaccgcaggtatcacattgtggagtacgtgcctggcatacatagcgaccgtgcaggataagccagtggtgagctatggggatatctgcttccggtatatgttttaccaattctttttcgacactgaacggagttgtacatttatctgataccaggcccaggcgatggctgacgcggaacacgtgtgtgtctaccgccatagccgctttattgaaaacaacggattggatgacattggctgttttgcggcctacgccgggcagttttaccagttcttcaagggtatcgggtacctcactgttgaattctttcaccaacatctgtgccatgcctacaagatgtttggctttgttgttgggataggagacgctgcggatatattcgtataccacgtcgggagtagcagcggcgagtgcttcgggagtagggaagtcccggtaaagggcgggggtaatcatattgacgcgtttgtccgtacattgtgcagagagaataactgctatcaacagctcgaacggattgtcataatgcaactctgtttcggctacgggaacgttctccctaaaccaagcaaggattttttcataacgctctttctttctcatcttaatttgtttttatgatagtgaggagatactttcagattgaaatagaagatggagataaccgtgaggcaggctccgaaaaaatatgccatatcgaatgaggtaatctgtgcgatataacctcctgctgtcagacctataccaatgcctacatcccatgaagtcaggtaggtagaggtggctgttccgcgctggttgttgggggccaggtttacgaacagcgtattgaaggcggggaacatcgtcccgaagcctactcccaataggagggcaaccataaaaaacaatatgtttgtcagttccgggacggtcttcatcagtagtccgcaagcggataatatgaagaaacagctacataccagatatagtcctaaagttatgacttgggtgatacgtcctttatccacttgtttgccggagaacatacgggacactgccatgccgacggccataaaagtaaaaaacaatccggaattcaaggtaattcctatttctttggcatacatggctacataagtgcttgtcatgccatatggtatggagagcagtagcagtgcgattcctgccgggatacctttcagcagcacaaagcggtccaatgagataggttctcgtttgacaggttgtttgggtggggtcttgacgaggcatgcggcaacaaaaccgatagttcctgatatgagcgagcaggcaaaaatcgtttcaaaggaatatatgtcatgcatgaaaagaccaatcatcgggccgaagctcatggctgtattgttcatcagtccataatatcctacggcttcgccgcgacgggacgaaggggtaatgtcaatcacaattgtatttcccgctacggtcaccattccaaatgcaaggccgtggacaacccgcaacatgatgaataaagataggactcccgctaacatgtaacctgcgaaaatggtgataaagatgaagtatgccaccagataaagaggcttgcgggctagcgtgtcgagcaggtatcccgagaacgggcgtatgcagagcgaggcaatggtgtagcatgacaagatgacacccactgctgcatttccggtatggaatacctcagtcaggtagaatggaagaaccggtagtatcagataaaaggcaaaatacaaaaggaaattggcagccaggataaggcaatagccggaagttacaagtttgtcttttgccatagcgaaaaatagtggttagcgatgagtggttagtgatgagtgattaatgatatgctgaaaatgcgcaacttattaatcactaatcactagccgttattcactatatttagtaagcgctctcgaattctttcagaaagcgtgtgtcattttcagagaacatacgaaggtctttcacctggtatttcaagttggtgatgcgttctatacccatacccagggcatatccgctatacactttgctgtctattccgttcagctccaatacattcggatctaccataccgcatcccagaatttctacccaacccgtatgcttgcagaaaggacagcccttaccgccgcagatattacagctgatgtccatttcggcactcggttcggtgaaagggaagtaggaaggacgtagacgaatcttggtgtcactgccgaacatctcttgagcaaagagcaataaggcctgtttcaagtcagtgaaagacacattgcgatctacgtataaggcttctacctggtggaagaatgcgtgtgcacggtagctgatggcctcattacggtatacacgtcccggacaaagtacgcggataggaggctgcgtggtctccataacacggctttgcacgctggatgtgtgtgtgcgaagaatgatgctgtgcgatacgttttctgtatcattttcgatgaagaatgtatcctgcatgtcgcgtgccggatggtcttcggcaaaattcatggaggagaatacgtgccagtcgtcttccatttccggtccatcggcgatattgaatcccatacgggcaaatatatcgatgatttcgtttctcacgatggaaagcggatggcgggttcctaattctatcgggtaggctgaacgagtcaagtcaatatcgtcacaaccagtatcctggctttcgaactgttccttcaaggcggcaatcttttcttgtgctttgtttttcagttcgttcaagcgcatacccacttcttttttctgttcggcggctacattgcggaaatctgccatcaagtcattgatggctccttttttgctgaggtatttgatgcggagtgcctctaattcctcggggttagcggctttcagtgcctctacttcctgcagaagctgattgattttagctatcatatcgttgttatcttatttattttctaagttaaaaacggtgcaaagatacaatattatcattgttttgccgccaattggggaagattatttggtgtcagtggtacaaaatttcatgtgaagaagcaatgataaaggattggagaaaaaataataatatataaaagtcttcatattgtttatggaaaaaacataaatgagcgttgtttagtgacttttaaaatatactttttgtatctttgcgccccgtttaccgttctatggaggtagaacaaactggcggttggtatttattaacatacgtcaaagagagagagttaacggagtaattgttgcattaaagttagagtttgaattgatgaaattgaagacaatcctgccagtcgtggcagttgcgggagtactcatgtgtgagcctgccgtattgttgcatgccggtacatctgattttgcttcttccgaagctatgggatggttccgtaagaaaaagaagagtgaagccaaggacagcgttcaatccaagagcgactacgagaaattgacgggttcaggtgctattgcctgcaagggaatgttcaatgtttaccagaagaagagcgattattactttgaagtgccggcaaggctgctgggacgtgatatgctggtagtaaataaattacagcgtgttccttccgaactgaatgaggcgggtgtgaaccgtggtacgaattacgaaaatcagatggtgcgttttgaattggacaaggctgccaacaagctgttggtacgtcagagccgtcctcttccattggcgccggatgaggatgccatacggcagtccgtactggataattatatttctccgctgatagccggtttcaagatagaagcattcaataatgactctaccatgatagtggtcaaggtcaacgatatttatgatggtacggagacgagcatcaataatgtctttacaaatatcaacctgggaacttcggccatcaaaaatctctcccgcattttatctatcaaagcttttgagaacaatgtggtagctacttccgagttgacaactaaggtgactgagggaacaacgactgtgtttgttacggtcgaagtcagttcctctctgttgctgttgccggagaaaccgatgatgggacgtctggatagtccgcgtgtaggttactttaccaatccgttattgaattacagtgacggtcagcagcgtgtagacaagaaacccttcatcacccgctggcgtctggaaccgaaaccggaagaccgggagcgttatcttcgtggtgaattggtggaaccggtcaaaccaatcgtgttctatatcgagaactccactccccgtcgttggcggaaatatatcaagcagggaattgaggattggcaggctgcttttgaacgtgccggattcaagaatgccatcgtcgcaagggagttaacggacagtatgaatgtggataaggatgacgtgaactactctgtgctgacctatgcggcctccaccaaagccaatgccatgggaccttctatccttgacccacgttctggcgagatattggaagcggacatcatgtggtggcataatgtgctgggtatgctccaggaatggattacagtgcaaaccggtgtcgtacgtcctgaagcaagaggagtaaagctgccggatgaactgatgggtgatgccatgcgttttgtggcatgccatgaggtggggcactcgttgggtttgcgtcacaatatgattgcttcctggacttttccgacagattccctgcgttccaaaacatttacggattgtatgaataccacttcttcctctatcatggactatgcacgtttcaactatgtggcacagccgggtgacggtgttacggcgctttctccccatatcggtccgtatgatatgtttgccatagaatacggctatcgttggtatggtaaagaaaccccagaggcggagaaggatttgcttgccgacttcctgagccgtcatgcagaccgtttatataaatatagtgaggcgcaggatgtgcgtgatgccgtagacccgcgtgcacagaatgaagatttgggcgatgatgctgtccgctcatctctgctgggtattgagaacttgaagcgtattgttcctcaaatcatccaatggactaccactggcgagaaaggacagacttatgaagaagcttcccgcctatactatgcggttatcaaccaatggaacaattacctctatcatgtattggcaaacatcggtggtatctatatagaaaacaccgttgtgggcgacggacagaaaacctataccttcgtagaaaaagaaaagcagcaagcagccttgaagttcctgctggacgaagtgctgacctatcccaaatggctgttcgacacggaagtgggagagtacacctacttgctgcgcaacactccgctgggcgtagtggagaatgcaccgacacaggtgttgaagaatgcccaatcctatatcctttgggatttgctgggcaacaaccgcctgatgcgtatgttggagaacgaatcggtgaacggcaaaaaggctttcacggtggtagagctgatggatggcctgcatcgcaacatctttgccactacggaacgcggtgctttgccggacgtcatgacacgtgccttgcagaagaatttcgtagatgcgctgattacggcagctgccgaaagcgaaggagtgaaaataaacaaaaaactgatggacaaccacttcttgctggaccaccagactgccctttgcagttgtgacgagcatgttggtaagactttggatgccgaccgtatgggggcccaccgcgaactgaacttctacggttcgcagataaaccgcgtatctgatgtcatttcagtgaagcgtggtgagttgctccgcatcaaggaactgcttcagagccgtttgggtacatcggatatagccactagatatcattataaggatttgattttgcgtatcaatacagcattaggaatgaagaattagggattagcgattaagggttagggataagtcgttagtaactaaccgctaatccttaatccctaatttgagtattaatttaattttatatgtaacgcatggaaaaacgtgtattaatcgttttgctatgccttgtgggagttttgtcatctgcttttgctgcagagaaaaaagtccagggcgtagtaatatcttcagaggataacctaccgcttatcggtgcttccatctatgtgactccggaagacttgaaaaaggcgggaagtgctcagactacaatgggggttattactgatgtggatggtcagttctctatagctatacctgccgggataacccgtttcttttgtagctacgtggggtatgacgtattggaagtaaagcttgttccggggaaggaattttatgaaataacacttcatgtatcttcccaaatgctcgatgccgttgttgtgacgggttatcagacggtggagcgtcgcaagctgacggcagcggtgtccaaattggatatatcggatgagactattggtgcagtaaaaagtattgatcaggcacttgccggacaaattgccggactttctgtcagcccgacttcaggtgctccgggtgctccggcaaagatacgcattcgcggtaccgcttcgttgaatggtacacaagaccctttatgggtgctggacggcattcctttggaggggacggatgttcctgaaccggatgaactgaatgacatcaccaacatgaaacaatcttccattgcgggcttgaatccggcggatattgagaatatcaccattctgaaggatgcggcagccacagccatctatggtgcgcgtgcagccaatggcgtcattgtgattacgacaaagaaagggaaggtcggtaaaccggttatcagtttctcatcccgatttacctatactcctacattgagccttgaccggttgaacttgctgaactcagcggagaaagtaggattggaaatggatatgatccgtaacaactattctccggacaatcataaaggaggtgtatataatattctttccaattacaatgagttgtctgcctttcagaatggaggatgggatgctctgagcagtgagacgcaagctgctatcaaccgtttgaagaatataaatacagactggggagatgttcttttccgtgatgctttcagccaggaatataatctgagtctttccggcggtacggaaagagttacttattatacctctttcggctattacaaagaagatggaaatgtggacggtgtgagtatggaccgttttaacctggtaggaaagacgtcttacaaagtaaacaatatattaaaggtgggtgcctccatgtttgccaatcgtcgtaaaaataccaattatctgacagatgcatatggcatgtccaatcccgtgttctattcgcgcaaggctaatccgtatttcgagctttacgatgaaaatggaaactataattacgattatgatattcagaataataccgataaggatttagggtttaatatctttgaggaacgtcggaacacgtccaatgaaagcgtagtgaattctttttcgtccatatttgatgcggaacttcgttttaatgacaaatggaagctgacttcccagttcggttatcagttggaaaagacttccagagaagagatagcagactgggaaagttatgccatgcgttattattacaagttgagcgaatactctcaggatggggaaacgaagcattttctacccgaaggggggatgcagaagtcatacgagaattccaattcacaaattacctggaaggcgatgggagaatatcgtgacagtttcaatgatattcacgagttggaagtgatggcgggtaccgaactacgcaagacttggtatgaaaccttgttctcggcagggtatggcttcgaccgcaagacgttgacgaccaaaccggtgattttccccaacgaaagttacgccacgtctttcccgctccatcagacaacgtataaggagaatgcttatgtatctttctactctacggcctcttactctttgttgaaccgctacacggtgggaggaagtatccgttttgacggttccgaccttttcggtgtggataagaagtaccgttatcttcctctttattctgtcagtgcattgtggcgtctgtcacaagaaccgtttatgcagcaggccaagtgggtggacaacctggtgttccgtgcatcctacggtctgcagggaaatattgataagaatacctctccgttcctgctgggtacttaccgatcggaaagtattctgcccggtgtgtcggaagatatgattgttattaattccgctcccaataagaagttgcgttgggaaaagacgcaatcagtcaatgcaggctttgatttttctgtattgaaccaggctatcaatctgagtgtggactattattaccgtaagggtaccgatttaatagctttgcgcatgcttcctttggagacgggttttacttctatgaacgtcaactgggcaagtatggagaacaaaggtgtggaaatcagcttgtctacccgtaacataacgacgaagaatttctcttggtatacaaatttcaattttgcttataacggtaataaggtgctgcaagaaaatattcccgaacagcagaccactccggggcgtgaaggctatccagtaggagcaatttttgcactgaagactgcgggtgtagataaggaaacaggtaacatgatgttctataatccggagggagagaaagtgaccttgaaggaactctaccgcctgaaagatgagtgggggataggtattgcctcttccgatgtaactgcagccgaagagaggaccttctattcgtatatcgggagtagcgatgctccttatacgggaggtttgattaataccttcagctataaaaactgggagttgaatgtcaatttctctttgacgtttggtgggtacgtacgtacgcagccctcttatgacatcatcaatccggattatggcaagaactataatgctgatgtgctgaaccgctggactccggaaaacccgaatgcggagcttccggcatttatgctgagtgcttccaacccggaagagtactcttggtatgattctaaaaccatctggagagatttggatatctgggtgaagaagctgaactacgtacgtttgcagaatctgcgtctgggttaccgtatccctgaactcctgacaaagcgtttgggaatgaactcggcaacggtatctgttgaaggacgcaatctcttcgtgtttggttcgggatataataactacatggatccggagtcgatgtacaatccttatgcaactcccgtacccaagtcggttacattcagtttgaacttgaatttctaacttcaaaagcagaaagaaaatgaagaaaacaataagtctgatgataatggcctgcatgcttctgcttgcggcatgcgacaactatctggatatacagcctaccggtagtgtcattcccaattctttggctgagtatagggcgttgcttgcccgttcttataaggacgtgagtaaattcagtgaccggggaatggcttgtttccgttccgacgagatgcaggttcgggatgatgaatatgatcaaaattattatatggatatagagcgctggaacgatcttgcccccaatgcctatacctcatcgtttgaatgggccaagtattataatgtgctttttattgccaatcatgttatagagagcaagagtgatatcaaagaaggtactgaagaagagataaatcagcttgtaggagaagcgtatatgctccgtgcttatgtacatttcttattggtaaatctttatgggcagccctatactaaggagggagctttggataccaaatcggtgccgctgaaactggatactgatttggagaaagtcctgaaacgcaatacagtgaaagaagtttatgtttccatccaagaagatattgatgaggcgcgcaaactggttacggaggcagaatgggagcagagatattcatatcgtttcaatacagcttcggtagaggcgtttcagtcgcgtgtatccctttacaagggtgagtggcaagcagcttggaatgctgctgaagcagtgcttgccgtgaagtctgtattggtagatttgaatgatgacgctgcaactcttcctaacaattataattccgtagagaatatcactccgttggagacacctttgagtagtacagtcaatggggctgctctggctactccggtttttctctccctttatgctgagaacgaccttcggctggataaatattttgctgaagcggatgaaaaaggtttcaggaagaacaagaaggcgggaagtaacaactatttgtgtactttccgtgtaggtgaaatatatctgacggctgctgaggctgctgctcaactaggacaactgcctcaggcacgtacccgcctgctggaattgatgcggaaacgttatgcaccggaggcttacgaagcaaaatctattgctgtcaacgctatggataaggaagcgttggtacaggaaatattggatgagcgtgcccgtgaacttgcttttgaaggacatcgttggtttgaccttcgtcgttccactcgtccacgtttggagaaagtgcttggtggtacgcgttatgtactcgaagaagatgatgcccgttatacattgtccattccgaaagaagccatagaagccaatccgggattgctgaactgataaagatgaccggtaaagattaaactccccgattctcggctgaacagcgcagggaatcggggagttttgtcttaatgtggattggatatatgttttttacgtacctttgcaccgtttttgtaatagacaatataagatgatacagaatcagagacctcctatccgtagaattgcttttccaattcttatagcattgagtatttcgcattgcttgaacgatatgctgcaatcggtcatttcggcgatataccctttgttcaaggaggatttatccttgagttttgcccagattggtctgattacgttggtgtatcagatgtcggcgtccgtgtttcagcctctaatgggattgttctttgataagcgccccattgcctggtcattgccaataggtatgtgctttactttggtcggcattatgaatctggcttttgcaactaatctgtattggctgctggcttcggtattcattgtgggtatcggttcatctgtactccatccagaggcgtcgcgcattgcctttctggcttctggcggaaaacgcggactggcgcagtctctgtttcaagtgggtgggaatttgggaggctcgcttggaccattgctggtggctttactggtagctccttatgggaggcgacatattgcttttttcacggcttttgccttgattgccatcgtggtgatgattcctatatgccgttggttccgttcctacttgaaccacatcaagaaaagcccgatgctcgtggcaggaaagatagaacgtcccctttcttcaaggatgacggtgtttgccataagtattctgctgatacttatcttctccaaatatatctatatggcaagtctgacgagttactatacattctatctgatccataaatttggtgtcactgttcaggactcacagctctttttgtttgtcttcctggtagccactgccatcggaacattggtgggaggccctgtaggtgatagagctgggcgtaagtatgttatctgggcttccattcttggaacggctccattcagtatgatgatgcctcatgtagggcttgcatggacggtagtgctgagtttctgtgtcggtctgatgctttcttccgcttttcctgccatattgctgtatgcacaggaattgctgcctaataagttgggtttgatttccgggttgttctttggtttcgcttttggaattgccggtatcgcttcggctatattgggaggtatggcagataagtatggtatagaggctgtttataatgtatgtgcctttatgcctttgttggggttggtggcttgctttctgcctaatttgaaaaagagatagaggttttgtattcccattgtcagccatgcagagagaacgaaaggtgcagtcaatgtagtgagtcctcagttaattcctacaatttacaaggctacagagagtaaaacgaaatacactgcccatattcagctcatccaattttggtcttctagagcaatggtacacaagataggagaggaataactcccccaatatatggtatatattgctgcattccgggaatttacgagggtgcctgcaaggaaaaatagtctggtcataatgtttccttgaaacatcacctggtttatatccatactgaaacattgtaagtaatcgatgtaggaagtagaaatgaatagcatgttaggcatcagctaactgcacaatcctagcagtagctatacagaaaggataaaaggaacagtgaacccgggtaacacgcgttgcatgttgaaaaaaacgtgtatgtagatagatatagatgcgtacgaggcaatagttatcagcatcaaggatccatttgcatgaatggcagaatgtgctttgctccccctcctttttgtgtggcaactcaaacgtaactaaagggctgatatctcaaaagagataccagttctatttttgtattagcaaaaagttttagcggacagtcatgtttaataaattatctttattgatattggttacagtgcagtttgtcatttctctgttaagcggtaaattggtttcctcaacaaaagacaagacggtatctttaccttcagttgattttgctcccgatatcgaacttggcactaaacgtacagtctagtgatagtcaccgaaggatattcagattatcggtctattctttcaaccggcacgaatatgcaatccaaattcttaattgccattgatctttgtccttgcaatttttatatgaagaatcttttggaaaaatgttttgaagcttgttttttcgttatctttgagcacagaaagcttttgatttgcacgaatatacactttataattacgccattaaagcgacgtttttttagataaagcatcttttatcagtcaagaatagtttagcaggaagtatacataacagtttgaagtattttgaattgcttcttgtttttataattctgtattaaactaataattgattgtttatgactagtgtaaaagtaaaattcagcccttcatccattatcctcaaagagggaacgcttcattatcaaataatccatcatcgtaaggtacgacatatccgtaccggttacaaactgttttcaagtgagtggatttctgcttccggtgaaatcgatgtctcggcaggaagtggagaagatcgaaaaaactatcttattgcgttaaaaaagcaaattgataaagaccttgttaaaatagagaaatgcatcaaccgtttggttcaggaagatgctcctttcactgtggaacgcatcatagagctttacactgttcctgaaggaaattacactttccttttatacggaaaagaactgctggttgaattgaggaaaataggcaaggtacgtacagcgggtacctatcagagtgccttgaatagctttgaacgttacttgaataaccgtggtgatgtctcgttggatgcactggactccaatcagatgatagcttatgaaagctggctcaaagggaatggcatttgtccgaacaccagttcctattatatgcgtaatctcagagctatctataatcgtgcggtagaacaaggttttgttgcccaacaaaatccttttaagcatgtatatactggcattgataaaacaaggaaacgtgctgtatccttagatgtggttagggaaatacgagacttaaatttgacgaaaaaatcactggtctttgccagggatatctttttattcagcttttatacacgtggaatgtcctttgtggatatggcattcttgaaaaagaaagacctgcaaaatgggatccttacttaccggagacataaaaccggtcagcaattgtttatcaaatgggaaaaacccatgcaggaactcattgataaatacgacacctctgatattccctacctactaccgattattcgaaataatggtatggacgaatggcatcaataccaaaatgaagcgcaccgtatcaacagaaatttgaaacacattggcaaacagatgggtttgggtattccacttactacttatgttgcccgccatgcatgggccagtattgctcaaagtaaaaatgtctctttatctgttatcagtgaagcattgggacatgattcggagcaaaccacccgaatttatcttgcctctttagatgcatctattgtagacacggcaaatagtctcattttgatgtctatatgaataaagtgatttatataataatcattaacgaatatgacaaaagaatatcaaagccattcaaaaagatacatatcttcataagagatgtacatctttagttataaaacttgaaatagagtaaccatcgtaactttatcttcataagagatgtatatttcgtttgcaaagatacaaaaaaactaaaaaataaagtaaacgcagcaagaaaaagcaaggttgatgataatacagcaagaatgcagtctattaagcagttaggtgtttaactcataatactgcataagctgaaaaaggagatccgctaaaaacagcgaaagacttcagttcccatatcgttactgatataacgggaataagaaacggcacaacgggttctatttcagtaatttgcacagtttttcatacctgaggacaactcgcttgatattaactttgtaacgatcaaaaaagtatgaaaacgagtatgagcagatcgactttcaaaatcctcttctacgtgaagaagggcagcgagagagccaacggctatctccccctaatgtgccgtcttacggtggacggtgaaatcaagcagttcagttgtaaactggacgtacctccgaaactttgggacgtgaaaacggcacgtgccacgggcaagagcgccgaggcgcagaaaatcaatgcggaggttgaccggatacgcgtggacgtgaaccgccgttaccaggaactgatgcagtccgacggctatgtcaccgccgccaggctgagggacgcctgcctcgggctgggcgtgaaacgcgagacgctgttgaaactcttcgagcagcacaacgaggagttcatcaagaaagtgggacacagccgcgtgcagggaacatacaaccgctaccgtaccatatacaggcacctttgcgagttcgtcccgaaagtgtaccgccgtgacgacattcccctgaaggaactcaacctgacgttcatcaacaacttcgagtatttcctgcgtacggagaagaaatgccgcaccaataccgtatggggttacatgatcgggctcaagcacgtcatctccatcgcccgcaacagcggtgcgcttcccttcaaccccttcgccgggtacatcaactcccccgaaagcgttgaccggggctacctaacagagcgtgagatacagacgctgatggaggccccggtgaaaagcgggacctgcgaactggtacgcgacctcttcatcttctctgtgttcaccggactggcatacgcggacgtgaaggcgctgacgaccgaccggctccagaccttcttcgacggcaacctctggatcatcacccgccggcgcaagacaaacaccgagtccaacatccgcctgctggacgttcccaagcgcatcatagagaagtacaaggggctgtccaaggacgatcatgtatttccggtaccgagcaacggcagatgcaacaccatattgaaggaacttggcaggcagtgcggtttcaagataaggctgacctatcatgttgcccggcatacgaacgccaccaccgtgctgctctcgcacggtgtgcccatcgagaccgtaagccgtcttttggggcatacggatttgaaaaccacccagatatatgcccgtgcgcccagaatggtcgcttaataaatacttctttagcaagaagttaggattgggttcgatatagtcctatcgtcaatcagtttatccaaaagggaaacccgatggagagtgtagcatactgattaaagctccaagtccactaatagtcaggtggcgactgaggggcaagacgaaaagacatacataaggatgaagccttgattggttgaatgatagttcagtggtaccaaatcttgcaacaacggaagactattatacatacgttgtttcatagtactctgcctattttgtgcgttagtgcagagcataaagaaccgactatgacacagccgcaataagcggacaagaacgaaagtcacatccgacagtatgtcgtgctaatagttattaagagaactaactggggattacctaagtcggaacgctggaacaaacagctataaagaaagcttttgaatatccgatatggtaacggaacttccgtagtagtctgagcaagggaaagccttgtacatggcgaagggaagtagtctgtaactttaatacaaacaacggaaaacgtgagagacgtatgagaaatccagagcaagtattaaacattttagctggacacagcaatgagcccgagtataaatacgaaaggctttaccgtattctattcaatgaacagatgttctttgtcgcctaccaacgtatgtatgcaaagccgggcaacatgacacccggcacagatggcaaaactgaggatgaaatgagcattgataggataaacaaactcatagagagtataaaggatgagacttatagtcccaatcctgcaaagagaacttacattccgaaaaagaatgggaagatgcgtccgctaggaataccgtcttttgaagacaaattggttcaagaggtagtaagaatggtgcttgaagccatatatgagggacactttgagtggacatcgcacggtttcagacccaaccgaagctgccacacagcactgaaaagtctacaaaacaatttcaacggtgcaaaatggttcattgagggagatataaaaggcttctttgacaacatagaccataatgtgctgatagaaataatgaaaggcagaatagcagacgacagatttcttcgtctgatacggaaattcctcaatgcagggtacatggaagagtggcaattcaacaagacttattcagggacaccgcaaggtggtatcataagccctattttggcaaacatatacctagacaagttcgataagtacatggatgaatatgccaacaaattcaataaagggacagcaagaagccgcaacaaggatatttgcaaactcaacagcagagtacactacctaaaacgtaggataaatgaagtagaggatgtaaacgtaagaacaaggatggtagaagaactgcacgaaaagcagaagctgatacttacaatgccaagtggcaatgatatggatgtaaactttcgcaggttgaaatacgtgcgctatgccgatgatttccttatcggagttatcggaacgaaaaacgaatgtgagacaatcaaagctgacatcactaagtttatgcaggaaaagttaaggctggagatgtcacaggaaaagactttgattacaaatgcacaagacagcgcaaaatttttgggttacgaaatatatgtccgtaaagactatgccacaaagagaaacagtaacggaacagtgcgcagatacttcaacgggaatgtgatactacacgtttcaagagaagtaatcaagaacaagctgctcagcctcgaagccatgaaagttgtcaccaaacacggcaaggagacatgggtgtcaaaaggcaggacttatatgattgacaatgaagcgcacgagattgtatctcagtttaataccgaaatacgagggttctacaactattactcaatagcaaacaatgcatcggctttgggacgctctttcggctgtattatgaagttctccatgtacaaaactcttgctcaaaagctgaatatgtcagtgagaaaagtcattgaaagataccgcaaggacaatctctttgcagtgccttttgtaaacaagggaggagaaaccaagtacagggtattctataatgagggatatgcccgcaaaacggattgtgaaacagccccaagtgacaatctgccgtacatgttcaaaacgccatcgttgagtctgatagaaaggcttacaacaaaaacgtgcgaactatgtggcaagcacggagaagtggtaatgcaccatgttcgcacactcaaagagttaaaaggtaaaaatgactgggaacgcaaaatgctctacatgcacagaaagactttggttgtatgtgcggagtgtaacgcaaaaatccagagatgtgtcaagtaagatgatgttacagatggagagccgtatacatggagacgtgtaagtacggttcgggggcaggtaagcgaaaacctaccgctgtaaagcggaaaggcgttgtttgccgagcctacggataaccaaccagaagatcagcagcgacatggaaatcctgtcccataagctggaaaagatggagaaggaaatatgcgatgccatctgaggaaatggtatttatgaaacggacgattttccccttcctcatcaaagttcgtccgtccctgcgggactccgcgttttcccttcggtttccggtagaaaatttccgcatggtgaaattttctaccggaaaaacgctccgaaagcgcagggacggacgtaaaagggattcagaaggcgaaaactgcgaccgacgtagtgcatgtgcgacaaggaaaagaactgtccgggagccccttttcatgccgtaccccggcatgagaccgctttcctctccggctgtggtgaaggctctcctgctccctctgcattgcatatgcgagttgttccgcctgtatccacgtcagccggtattgcctgccctttccttggtagaaacggcttgtcgcaacaggcggcgtgacacaaacttttccggatatggaggaccattccggaaaatacaccgtacatttgtacatcgaaccaataataaccgaataaccgttaaaagaacatggctaaaattaaagtccaaaatacagaagtgacagtcatcacgtacaatgacaaggattatatctccctgaccgacatggtccgcaatatggaaaacggtcccgcccttattgaaaagtggttgcgtaacaagaataccgtcgagtttctgggcatatgggaggagatgtacaatccggattttaattcccccgaattcgagggaattaaaaacgaggccggattgaaccgtttcatcctttccgtcaaacaatgggtggaaaagaccaactccaaaggtatcatcgccaaggccggacgctatggagggacttacgcacacaaggatatcgcgttcgagttcgccacgtgggtatcccctcaattcaagctgtacctgctgaaagagttccagcggttgaaagaggaggaacaggcccagctcggctggagtgcgaaacgggaactgtcaaagatcaactaccgcatacataccgatgccatcaggcagaacctgataccggtggaagtcacccccgcacaggccggcgtcatctatgcggaagaggcggacgtgctcaacgtagccatgttcgggatgaccgccaggatgtggcgtgagcagaatcccggtctgaagggcaatatccgtgactatgcctccatcaatgaactgatctgcctctccaatatggaaaacctgaacgccgtattcatagaccagggcataccgcaaggcgaacggctcgtgagactgaaccggatagccatccagcaaatgcgtgtgttggaagatgatggcggacgaaaactgcttgaatgagaattccggcaggcaacgcatcggcatgtccgtaaacggggcaaggaggtgaaatgccgcctgatccacattcatgcatgggatatgggatactgaagctacggaacggcttacagcctgatatcaagtgtcataaccgttccgtggcggggtattgttcggaacacattcccgaatgaggtcttccatgattttaaaagactccgtattccagaaggaacaaacgtacacatacaatttctccggaacggctaaccttcctgtcacttccctgtaatcctccccaaaatcaacactgccgtataaaccgcatgaaagcccggacatgcttcctgtttccaatcccatttccgctccttctgcaatatcacgtattgccgttctcattccatatccttgaatatttctccaagtatgccgaagacagaaaagctgcatggtattttagattctcaccggacaggcaatagacagaaggaatccgtcatcctcatttcttgcggcaaaaatagttgtttttcaggccggtcccgcaaggcggcccttcgggctggttgcacgtgaaaaaatcttcctcacgcttcgcgtgagcgtattttttcacggcaagccttgccggagaccgccgaaaaacaaactggaggaagcacaagaaataagaatgcctacccgtgtaggccatgtataactcaaaaaaatataaagctatggcagacaagagcgcagaaaaggaaagactgttcaacgagtggttcactgcatcctatgacaggttgagagggacgttacgccggtacggaatgctggacgaggacaatttccatgacacctacctttttgtaagaaggcaggtgctggttcccggaaaggacataacggactatgacgcgtatttcatcggatgctacaaaaaggcggccctggtaaagattaaaagggagaatcggtatgcacaccctgaagatgatttcttcctccgatgtggcgaagaggcaaaattcctttccgaggacgacctgaacgggtgcgagcggctggtaagagacatactgagtttcgtaaggcagaagttctcctacgaggagtaccggatgttcatgctcaggttctatgaggcgcagttctcgttcaaggcactggcggaatgcatgggtatctcggcatcggccatatcgcagaaagtatgcaggatagtggacgcggtacgtacccacagcggtttcgcatggagaagtcagatgctggcggtggaaagcttcatgtattgaaaaaattgtttaacggaaaagtaagaaagttatggcactgatagtatacaacagggaaaactcccgtccgcaggaagtcacatacaagggaaagcggaccatcaaccttgacagcagggggaccgtctatctgtcaaagacgatgtcaatcgaattgggaatcctcggtggcggacgggtgaacttcgcccacgacgacgagacggatgactggtacatctgccgggccgatgacagcgaggggttcattgtctggaaggataaaagatgcgcaaggttctcggcggggtttatcgtgcagagactcatgcggcaggcgaaggtggagaggaagagcgtgcagttcatgatggcgaggatgccggtagagattggcggagtggcctattacaagatactgctctcgaatccgatactcagatagaggcatgggccggaggagtccggctgtatatgacatgacggagacaggtgcatccgacgggacaggagcccggaggatgtgcctgtttttatgcgccgccatgtttacacacggacatgcggttgtcaccggccggcataaggtcactccgaaaagaccgggaaacggcattgccggaggataatgataccagtacggaatgtgccgccattacggaaacggatcgtcccaccggtacacgaacggcccgccccaatttcagaataacataatgacataataaaataagagtctttttttataatggaatccccgtatcttattgccatatcggaaaaatgtttccatgtcccgccatgttatgccaatgttgtcaccggatcataattcataaagaaaaaacactctgtgtataagtattttacgagcaaattaaagtcgttcatccggtggaaagaaaatgaaggagcgaccggtatgacaaccgaccgccccttcattcacgatcccgtacggaacttttctaaagttcctccggcctggttctcgcctcccggtagcagccgtcaagcagcttctcgatgtcggaagaacggtacagtatcttgccgcccagccgggtgaaggcaagcagaccgctgtcacggtactgttgcaggctgcggcggctcactttcagcttttcagccagttcgcggtccgtatagaagttctcgcccgccatcgccggtgacctgccggcaaagagacgctccatggaaacggagagacgttcgacggtggagaagaactctcttatatgctcgctgctctcacgggtgagcagacggttatcggtattcatcatgacttgatcttttttttgttcgacattcgtttttcatggcctttcagatcgaccttcccatactttcagcccgcttgcggcgctcctccactatccggatgatactttccacgtccccgggcttgtaatatgtcttgtggcagatctgtgtgtatgccagcgtgccgttgtcacggagggtctgcagggttctcgggctgaccttcagcagcaggcacacctcctggttgtccagccatttcttctcctccatgtcgccgtacagccggcagagggtgtccagccggtccgcaaacgtccggaaggccgagagcatcgcctcgaaggtccttgcctcaatgttcactatttccataatcactgtaatttcaggtttgacatctgtttcattctcttttcggatccggattccgttccgcaatttagtgaatcccggcggaacgtcctgaatttcaagacaggatgactacctttgacaccatatgcgtacttgtttcatctgcaaagtaaatgattgttcccggatatggttccgccccttcatcagatgtcattatatgtcatcagatgtcatggaaatcggattttaatattcatttgcttttagtaaacagacgttcagatccgttcccgaagagtgggaaatttccggtaggctcggcaaacaacgcctttccgctttacagcggtaggttttcgcttacctgcccccgaaccgtacttacacgtctccatgtatacggctctccatctgtaacatcatcttacttgacacatctctggatttttgcgttacactccgcacatacaaccaaagtctttctgtgcatgtagagcattttgcgttcccagtcatttttaccttttaactctttgagtgtgcgaacatggtgcattaccacttctccgtgcttgccacatagttcgcacgtttttgttgtaagcctttctatcagactcaacgatggcgttttgaacatgtacggcagattgtcacttggggctgtttcacaatccgttttgcgggcatatccctcattatagaataccctgtacttggtttctcctcccttgtttacaaaaggcactgcaaagagattgtccttgcggtatctttcaatgacttttctcactgacatattcagcttttgagcaagagttttgtacatggagaacttcataatacagccgaaagagcgtcccaaagccgatgcattgtttgctattgagtaatagttgtagaaccctcgtatttcggtattaaactgagatacaatctcgtgcgcttcattgtcaatcatataagtcctgccttttgacacccatgtctccttgccgtgtttggtgacaactttcatggcttcgaggctgagcagcttgttcttgattacttctcttgaaacgtgtagtatcacattcccgttgaagtatctgcgcactgttccgttactgtttctctttgtggcatagtctttacggacatatatttcgtaacccaaaaattttgcgctgtcttgtgcatttgtaatcaaagtcttttcctgtgacatctccagccttaacttttcctgcataaacttagtgatgtcagctttgattgtctcacattcgtttttcgttccgataactccgataaggaaatcatcggcatagcgcacgtatttcaacctgcgaaagtttacatccatatcattgccacttggcattgtaagtatcagcttctgcttttcgtgcagttcttctaccatccttgttcttacgtttacatcctctacttcatttatcctacgttttaggtagtgtactctgctgttgagtttgcaaatatccttgttgcggcttcttgctgtccctttattgaatttgttggcatattcatccatgtacttatcgaacttgtctaggtatatgtttgccaaaatagggcttatgataccaccttgcggtgtccctgaataagtcttgttgaattgccactcttccatgtaccctgcattgaggaatttccgtatcagacgaagaaatctgtcgtctgctattctgcctttcattatttctatcagcacattatggtctatgttgtcaaagaagccttttatatctccctcaatgaaccattttgcaccgttgaaattgttttgtagacttttcagtgctgtgtggcagcttcggttgggtctgaaaccgtgcgatgtccactcaaagtgtccctcatatatggcttcaagcaccattcttactacctcttgaaccaatttgtcttcaaaagacggtattcctagcggacgcatcttcccattctttttcggaatgtaagttctctttgcaggattgggactataagtctcatcctttatactctctatgagtttgtttatcctatcaatgctcatttcatcctcagttttgccatctgtgccgggtgtcatgttgcccggctttgcatacatacgttggtaggcgacaaagaacatctgttcattgaatagaatacggtaaagcctttcgtatttatactcgggctcattgctgtgtccagctaaaatgtttaatacttgctctggatttctcatacgtctctcacgttttccgttgtttgtattaaagttacagactacttcccttcgccatgtacaaggctttcccttgctcagactactacggaagttccgttaccatatcggatattcaaaagctttctttatagctgtttgttccagcgttccgacttaggtaatccccagttagttctcttaataactattagcacgacatactgtcggatgtgactttcgttcttgtccgcttattgcggctgtgtcatagtcggttctttatgctctgcactaacgcacaaaataggcagagtactatgaaacaacgtatgtataatagtcttccgttgttgcaagatttggtaccactgaactatcattcaaccaatcaaggcttcatccttatgtatgtcttttcgtcttgcccctcagtcgccacctgactattagtggacttggagctttaatcagtatgctacactctccatcgggtttcccttttggataaactgattgacgataggactatatcgaacccaatcctaacttcttgctaaagaagtatttattaagcgaccattctgggcgcacgtgcgtatatttgtgaagtcatcaccgtcagactgatccaacaatatgaataacacggcaaaccccgccaatcggacccgtccgtttcacagcacttgttattatcgttttatttgcttccgacaatcgggcaaacgggtagaccgtgcccacagtatcaaccatctaaaatccatgtacaatgaaaagtgaaccgactgaaaaaacgaaagggaagaaaatggcggtatccgaaaccgcagacagaaagaacggccgtagtcccggagccggccacgacgagtggtgggaaagactcatgatggaacccggtccgggggaatccgccggtacggatgcttccgtgacggaatcgatgattccatccgggctcgttgcggaggaggtatccggggaggcgagaagaaaggacaccccgccggaaccggaagaccccgtgagaagaagaacgagcggcaggcaacgcagggcctcgctggaggagtaccgggaaacgtacctcaccgtcccgaagatcaggaaccgcaagacggtgttcgtcagtgaggatgtgagggacgaactggacgccgtcgtccgcaggctcggcgggcgtggcatgagcgtttccggactgctggagaaccttgccagggagcatcttgccgcctaccgtggggacatcgagcagtggagaaaaatctgacagcctgttaccgggcgtggagtatacccgatgtatgcactgttccctgtatacccgcttcaatgtggaaaatgcgggggggggatttttctgtggggggagcaagggtatgtttccggattcccgaaaacccttgctccccgcgcccggcggttgctgggagggcaaatccgctcccgccggtcgcagattttggaatgaaagaagtacggacgaaaaagaaaaaacatatgacaaacgatgtgaatgggatgaagaaaaaatgtggccgtccggcactgggcaggacgcgtaaattgaccagaggcgtgacggtgaagttctcccccgtcagctacgaggctctcaggttcagggcagggaagtccggccggagtctggcggtctatatcagggaggcagcactggcggccaccgttacggcaaggcatacaccggaggagaacgcactgttgcgcagcctggcgggaatggcgaacaacctgaaccagctgacaaagctctcgcaccagaccggcttttacaggacaaggctgctgatagaggggctgctgggaaagctgaagcggatcatggatgattacaggccgaaaggaggatagcctcatgatagggaagatcaggaaaggccgctcgttcagcggctgcatacgctacgtgacgcagaaggacgacgcaaaaatcatcgcctcggaaggcgtgctgctgggaacggtggaggagacggcacgcagtttccggtggcaatgcctgctgaatccggacgtggcgaaaccggtggggcacattgcgctcagcttcaagccggaggacgcaccgaggctgaccgacgcgttcatggcaaggctggcggaggaatacctggagctgatggggatacggaacacgcagttcatcgtggtgaggcatcacgggacggacaacccgcactgccacatcgtcttcaaccgggtgaacttcgacgggaaggtgatttccgacagcaacgatttcaagcgcaacgagaaagtgacaaaaatgcttaaggacaagtattcgctcacctattccgaaggcaaacagtccgttaaaacggaaaagctgcatgcttccgaaaaggtgaaatacgaaatataccgtgcggtcaaggaagctttgaggagtgcagatacatggaaagaatttcaaaataagctcttaaaaatgggcgtggaaatggaattcaagtacaaggaaaacactaatgaagtgcagggcatccgctttataaagaacggtctgtcattcaagggaagtgggattgaccgcagtttcagctggtcaaggctggatgcggcattggaccataaccatgtcacgtccctggaaaatgacgtttcccaaaagcaaccgtaccatgaacaaagtcatggttctgttattgataacctggtcgaagtcaccggtacgggtggcgtgttcatgccgtcggtggcaccgacggaggacgagaaagaggcggaacgcctgcggagaaagaagaagcgcaggaaaggaaggagtttgtgaaccatatgtataacaaaaaaactttgaaagatgaaagaggaaaattatctggaaggcatctacggatgccttgaaaggatcgagaagaaagtggagacgctgcccgtggaaggcacaagccccgcagttggaaaccggaccagttccccggaagggattgcggaactgaaaatccgtctggaacgcctgcaatccgcggtggagaaaaacggcttggaaatagcagcggtacgtaaccataccgtccggttgtcggaaggctggccgttgtctgccgaaacgtttgccggagaaatggaaaagacaagggacagcctgcggcaggacagccaggcggtaaaggaaacggtaagacggctggatgagagaatggtcctgttgaaaaaggaaccggtacacaaactggtgacctaccgtctggaaagcgcatccaaggcggtggtaacgacagcttcagcactgatcctggcactggtcgtttccgtctggaccaactgtaaccagtaccgcacgaaccggcttttgaaggatgccgatttgaaataccgtgccatcaggatctgcctgccgggggatgatcccgacatcgccttcctggagaagcatttcaccatcgagcgggacgaggaaaagatccggcgtgtggaaaggctggtgaccgcttttgaggactcggtcaggaaccgcatccgtaatcatgaaatggcggcctacaaggacagtctggcgcaccggctgttcagggaggcacaggaaatcaggaagcaagtggacaatcctaattcaaaatgactgcactatggcaacaatcaaaaccaaattcaggtcctcgtccgtggaaggcagggaggggacgctctatttccagatcatccacggaagggtggcgcgccagataaacaccggctacaggctgttcccttcggaatgggacggacgcatgtcggaaatcatactgccggtatccggtgatgccagaagaagccttctgcttgcgttaaaggagcggatggaaaaagacatccgccgtctggaaagtatcattgccggactggaacgttccggcggtacctatcccgccggcagggttgtcgaactttttcacaacccgccccctgaggacagccataatttcatggccttcggaaagaggctcgtggaggaactggagcgtgtcggcaagaagcgcaccgccgagaggtacaccaccgtactgaacagcttcacgcgctttcggggcagggacggcgacatcccgctggaggatatcggctccaccctcatgctggaatacgaggcatggctgaaggacaaggggatatgtccgaacagcacctcctattatatgcggaacctgcgtgccgtctacaaccgtgcggtggacaaggaactgacgatacagcgcagccctttcaaacatgtctacaccgggatagacaagaccgtaaaacgtgctgttccgttgaaagtgatccgcatgatacgcgatctggaccttcgcatttccccgggcatggaatacgccagggacatgttcatgctgagcttttatacccgtggcatgtcgttcgttgacattgcctacctgaaaaaagctgatctgaagagcggtgtgctaacctaccgcaggcagaaaaccggacggcgtctgtccattaaatgggagaaacccatgcaggagatactggacaggtatggccacaatgacagcccctacctttttccggtcatcaaagatacggctaaggatgccgtgcggcagtacaggagcacagcgcatttcatcaacgggaaactcaaagaacttgggaaacggctcgggctcggcatgccgctcacgatgtatgtagcgcgccatgcctgggcgagtattgccagaagcaaaaatgtcccgctggcaaccatcagcgaggcgatgggacatgattcggagaacacgaccaaaatctacctcgcctcactggacacctcacaggtagacaaagcaaatgacatcatacttaaatctttataacgggaacaaatgcgacacgcagaatactgaataaaaggctataccgatcctgcttctctttttaagagaaatattagacattgcaaagataggtaaaatataggaaaatatccacctgtatgataaaaaacagttttcttcgaaagaaaatgtttcaaattccggtttaattgtcaaacaaatccttgtcaggttccatatatagcatctgattatcagaactatccctttccggtatttctcttaaaaagaaaagtaccggaaaagatctatgaatacagtggcagaatactgttggaaatgttcttattgacaatttaaaaccagatgcgtttgaaaggtttttgaaagcattttgtaatataataaaaattgttgagcatacggctcattttcttggcaagagaaatattagaggaccatattttatgtaattaattgatagacaagtagaaaagcgaagtggcattgtggcgtttatccaatatatgttaagcaaatacactctgtatgaatgttttggttatattttatcacctgttttctatcgtttcttcaatattttacataactttgcacattgtaatatttctcttgccaagagaagtagtgacggaagccccggaaatgaggtctgtacactttgtcaaaagtatggaactaacaatggatattatgggaaaagggaacgtaatccattgtaatacatgccaatatgtaggttggcatgaactaggtttatatccacacctataaaatgtttcggaatatgagtacgagtctttttacagcggaggaaaaaaggcaggtccgatggttcgtcatgcgcgcctacaagaatgagaaaatggcagaggacaggctgaaagacaaggaatatggtttggaatattttatcccgaaacattatgccgtaagaacttatcatggagtgaagtcaaaaaagttggtgccggttataccgagtctgcttttcgtccacgccagccattcgcagatcactgaattcaagaaacgatacaatttcttgcaattcgccatgtgggaaaagagcacgggggcggaatatattaccgtaccggatgaccagatggacagcttcatcaagatagcttctcattatgaggaggacactgtttattataggcccgaagaaatagacttgaaaagaggaatgcgtgtatgtatccacggtggcaagttcgataacgtgaagggcatgtttgtgcgggtgcagggcaagagaaaccgtagggtggttgtcctattggagggtgtcatggccgtttccgctgaggtgcaccccgatctgattgaagttctttcctaaaaccgctggcttttacgggacttcgcaaaaatcacgataaaaattaattgaaattacaaattagaaataatataaactgtacagatataaatatgaagaatcgatttttgatttatctctttgcgatagtgttgtttacatcctgtcacacttcgaaggagattctttactttcaagacattgctgtgaatcagcctgaagcgattgtgggtgcaagagacatcaccgtgcagcccaaggaccaaatttccatcatggtatccagtaaagacccgcagttggcagcgttgttcaacctgacacgtgtccagtatcgggcaggaactgccgatttacgtagtagcaacaataatggtgaaatatccggttacacgctcgatgacaagggaaacatagactttccggtcattggtacgcttcatattgccggtatgaccaaaagccagattgccgcccttatcaagaaacggctgatggaagaggacttggtgaaagatccggtagtgaccgtagagttcatgaatctctatttctccgtgttaggtgaggtaaaaacccccggcaagtacaacataaccaaagaccagatcactttgcttgaagccatcagcatggcgggcgacttgaccattaccggtaaacgtgatgctatctttgtcatccgcgaggaaaacggtgagcgtgtcacccactgggtagatcttcgtagtaaggacatttttaaatctccggtctactatttgaagcaaaacgatgtgatttatgtgcagcccaataagatgcgtgccggtcagagcaccatcaacgagaataacgtgaagtccgtatcgctatggatcagcgtcgcttcattcctcacttcgttgggtgtgctaatattcaagtaaccttcagaaaaggaatcactttatatttttataatatgacagaaaagaaaacaaccgccagcaagcctgctgacgacttcatacgcatacaagacctgtgggggattttcatgccccggtggcactggtttgccctctccctgttcgtaaccctggcgacagccgccttgtacctgctgggcaccccgaacatttacacccgtaccgctgccattttggtgaaagatgattccaagggaggaacatccaccaatgtggtcagtgaattttctgacttgggtatcttcaagtcgaataccaatatcaacaatgagttgctcaccctgaaatcgcccacgctgatgaccgaggtggtacagcggttgggattaaacgagacctatactgtccgcaaaggactgaaagatgtggaattatacaaaagttcgcctttagcagtcacctatcgccacttggatgaaactcctgtcggttttacaatagatatttcatccaaagaaacgtttgtcatatccgacatggaagtaaacgggaaagcgtttggggaagatttctccggaaagatgggcgattccatccgtactgaaataggcacacttgtcatcaatttcacaaaatattggaacgattcattcgtgggcacttccatacgttatagaaaaggtaatgtgtgtgccgtcaccgattattatacagccgctttgcatgcggaattgggaaacgaggatgccaccattatcaatctgagtatcaacgatgcctccattcagaaggctgaagacattctgaacaccctgattgaaatgtacaacgagaaatggattcaggacaagaaccagatcgccgtcagtacttcgcagttcatcggtgaccgtctgagcgtgatcgaaaacgagctgggcaatgtagatgagaacatcgccggttacaagagtgagcacctgctgccggatgtgcaggcggcatccagcctctacctgtcccagtccgccgagaacaagaaggagttgctggcactcaacagccagctttccaccgcacagtatatccggaaagagttgaacaacaagaaactcagccagctgttacccaccaactccggtatcgctaatgtcaatattgagagccagatcggtgaatataacacgatcgtgctcgaacgtaaccgcctgatcgccaacagtagcgagaagaaccctctggcaaaagacatggctaactcactgcaaagcatgcagcgtaccatcattcagtcggtggacaacctgattgtttcgctcaatacccaaatacgcaacatccgccaacaggaagccacgaccaccagccaactggcttccaacccgaaccaggcgaaatatctgctttctgtggaacgccagcagaaggtgaaggaggaactgtatctttatctgctccagaaacgtgaggagaacgagctttcacaggctttcaccgcctacaatacacgtgtgattaccgctccgagaggcagcatgcttcccacagccccccgaaagatgaatatccttttggtggcattcgccatcggtctgcttgttccggcggtgattattttcatgaaggaaaacatgaataccaaggtgcgcgggcgaaaggatctggaaaacctaagcattccgttcatcggtgagatcccccaatatctcagtgctaagaagaaattgggattcgataaacacacacagtctgtcatgaaagccatcgtggtgaaggaaggcaaccgtaacattatcaatgaagcgttccgcgtgttacgttccaatattgactttatggcaggcaaggacagcggtcagaacgtgttcatgcttacctcgtttaatcctggcagcggcaagtcgttccttgccatgaacattgccatgagctttgccatcaagaaaaagagaatattggtgatagacggtgacctgcgtcacggctccacctcctcctacgtggattccccgaagactggtttaagtgattatctgggcaaccgtgtcagtgactggaaggagattatcgtgaaggatgaaaaatacgacaacctgcatatcattcctatcggtactgttcccccaaacccgacggaactgttggaggacggcaagctggccactttgatagaggtgcttcgcagcgagtatgactatatctttattgactgtccgcctatcgatatcgtggccgatgcgcagatcatcgagaaactggctgaccgcaccgtctttgtagtccgcagcggtttattggaccgtagcatgctgcccgaactagaaaatatttaccaggagaaacgtttcaagaacctcagcgtgatactgaacggtacagaaagtgccggaggccgctatggctatagatatggctatcgcaacggctactcttcctattatggaaataaaggaaaaatggggggggggtaaatggatggtcatcaagtgattgattttgcatgttatcgttctcgtaagaacttttaattttaactcaactatcatgtggccctttcgtaagacaataaccttcgcccggagcggtatcctgaaaggaatgaccgactgtcacagccatctccttccgggagtggatgacggagtgggaacattggatgaatcactccgaattctagatatgatggaaaagcatggagtcagaaaggtatggctcacgccgcacatcatggaggacatccctaatgaaactgtgaccttgcaggaaaagttccaagaattgaaacggagttataacggcacactggaacttgccttggctgcggaatacatgatggacaatctctttgaggaacggctggaaaaagatgacctgctgcccctagaggaggggaaacgttacctgttggtggaaacctcctatttcaatccaccaatggaactgctctctgtcctgcaacgcatccaaaagaaaggttattacccgttgcttgcacattcggaacggtatgaatatatgcagaagagggattatcaggccttgaaggaagagcatgtctccttccaactcaatttgccctcgttggccggaatgtacggaaaacatgtacaggaaaaggccgaagccctgctgaaagccggaatgtacgaccgtaccggttgtgacatccatgccataggctgttacaagacattggtcgcttcggcagtaaaatcggaagtcattggaaccttacagaaacaaagtgatcaatgattgcaaattttgcattgacgagccttgtaatccgaaaggatgaccgctggaacaggaacgtactgcgcatcttgaaacaaggtgaacaatatcagttcaatggctatggtgatgagtgcaggtcgcttgaaaggaatttctttgctgcgggggtgacaataagtgccattgtcggcaagaatggaagtggcggaagaaattatctggaaacgtaaggcatgggataagagctatatgaagatgatggaaaatcaatacgatgggatgaccataactccttcccttcagaaacgtatcatttttggttttctggagaatgaaacggacattcatctacgtccgttgactaaattgcaacaagacttgtacaatcaacaggatttggtataatctttaatcttagaataaaagacactgatatttttatatccaatgttgttatgcatggtttcactacggctcatgccataacagctatggctttggtccagacagtggtcggatacgaagctgcattaacaacattgacgataatcacgattgttcctctatcaaagattctgttgtccttcgtgtgaggaatggaacttcttcgtcatgcccccacaagtatgtcttaggtgaaatagaatagatgcgatcagaaaacctcttgattattagtcaaatgtatagtgctttgtgcttacgataaattataaacaatatacttttatgaatgttcatcttataagggaaaacgaaaatcaaaatgatggttcttatatccacttgtatcggaataaacagatcggtgcatggtgtgcatacggttattccgcatacggtttacgtctttttgataaacaacaaggctacatgaattttcgtagttactcagactgtcttcagatgccgtgtacggttacatccggagaatcccttgtttcattgttgcaaggttctgttgaggtaggttcacaaactgagacctatataaagttaaaaatggcagatacaataaattttaatgcttatcagaagtggttgcataagctgaaaaaggatgacccgaatgatgatgcaataattgtcaccacacatgtcagccaatatgtgccacgggacagtttcattcccgatggaatgtccgcatttgcgcgcaatgtaaagcgtatcggtgattttatcctgtcattgattgcattgatcattttttctccgctattcttgttttgctacattgccattcgcagggaagatggaggaagtgtcatcttcaagcaagaacgtatcggcagattcgggcgcccgttctacatatacaaattccgctccatgcgtctggatgccgagaagttcggaccgcagcttagtcataccgggggtgaaaatgattcccgattgactaagaccggtcgtttcatccgggcgcaccatttggatgaattaccccaactctacaatgttctgcgtggcgatatggcattcatcggtccacgtccggagcgtaagttttatatcgaccagatacttgaacacgacaagcgatatacttatctttaccaaatccgtccgggcgtaacatcatatgccacactatataacggctatacggatacgatggagaagatgctccgacgtttggaatatgacctttattatttaggacatcgctcatggtggttcgactttaaaattctgttgaacacattctgttcaattgtactcggaaagaaattttaaaagattaataacttatataacagattgataatgaaagcttgttttatgggcttggggtatatcggattgcccacagccattatcgccgccaagcacggcattcagattacaggagttgatattaacccccaggtagtggatatgacgaatgcaggacatctgcatatcattgagccgggtatggaggagatgttgcaggaggtggtgaatgccggctcgttgaaagcttccataaagccggaggtgagcgatgcttattttatggtagttcccaccccgttcaaaggaaatcatgaaccggacgttagttatgtggaagccgctacacgtgccgtattgccattattaaaggaaggcgacctttatgtcatcgagtccacttcacccgtaggcaccaccgaagcgatggcccgcctcattttcagcgaacgtcctgaattggaagataggatttatgtggcttattgtcccgaacgtgtattgccgggcaatgtgatttacgaactgatacataacgaccgggtcataggcggtttaaatcctgaatctaccgataaggccattggattttattctcaattcgtgcagggaacacttcatagaaccaactgtcgtactgctgaaatgtgcaaactgacggagaattccagtcgggatgtacaaatagcctttgcgaatgaactttccttgatttgtgacaaggccggtatcaatgtgtgggaacttatcaatcttgccaacaaacatccgcgggttagcatcttgcagcctggttgtggcgtgggaggtcattgtatagctattgacccttattttatcactgctgattttccagcagagagtaaattgattgccgatgcccgtgaaattaacaactacaaaagtttttggtgcgcagaaaaagtgaaaaatgccatgctggaatttgaactgaaacatcatcggaaaccgtgcgttgccatgatggggttggctttcaaaccgaatatcgacgatttgcgcgagagtcctgcaaaatatattaccacgaaagtgatgcagagttgcaataatgccaatatcctggttgtggaacccaatgtaaaggagcaccatgtgttcaagttaacagattacaaagaagcctacgacaaggcggacatcgtggtattccttacagcacacactccgttcaaagaattagaatggcgagaggataaggtgatattggacttttgtggaatatttaaaaaatagtgaatatatgaatattttagaactgacaggtatgaaatcgactaaatacggcggagtagaatcctacttcgctgaattggtcaagatatgccgtgttgataaatttatttttgtatacgagtcgatgccaatcagtgaaaactatgtaaatgacatcaataagtggggggggtaatactttgtaaacaaagcatttccacatttcaatatttcaaatttgtgataggtgtcatcaaacgtgagaaaatagacattgttcattttcattttggaagttatcttattgcaccattcttgcgaattctgtttccccggattcggattatttcaacccgtcatagtgaaatctttgtttccaacaaacttaaaaaattatatctgaagttctgtttttttccttttgaaagattcctttgtgtcagttgtggcgtaaagaaagaaatgattgaaggcgtaggtttttcttcaaagagtgaagtcctatacttgggagtccggaaaaaaaagattgtcaacccaaatctgaaaaaaacattggacataccaaagggggtagtcgtgttgactacaatcggattcaatattcgtatcaagggattcgatatacttgtcaaaagtattcagagtctgatggactccaacagacttaaaaacgatataatagtgcttgtcatcggaattagcgaaaattctgaagacagtaatagcttgaggcaattgattgccgaggccggattgaatagaaagattatgtctttgggaatacgaaatgacattaatgatattttgaatatttctgatatttacttgcagccttcccgtacagaaggactttctcttagtattatggaggccctaaactattcgttgcctgttattggtacacgagttgggggcattcctgaaatcgtacatgagggagaaaacggatatctttttgaaaaagagaatgttgaagggcttgctgacaggattgagatacttgtcaataatcgtgaagtccgagaaatgatgggtagaaaatcaaaagtaatatccagtcggttcacgcttgcagacggtgtggaaaagttagcttctatataccatcagaccaattgatttgcccctgacactctattgtcattcaggttgcaattgagattaaaaaatgtaggatagttataaatgcagtcatcaaacaaacgcatagcacgcaacacgttaatgctttatatacggacattcgtaatgatgcccgtatctctatatacttccaggattatattggaagtgttgggagagaacgattttggagtatacaatgttgttggcggctttatcgcacttctgtcttttattaattccgcaatgacaaaagccacccaacgttttctgaacgtggaattgggaaaaggcaatcatgacagagtctcgagggtttattccatgagtcttctgatacattttgcaatagcggtatttatcggcttcgtattggaaactgtggggctctatttctttgaaacaaaattgaatattcctccggaaacacaagatgcagcacgggttgtgtaccatatttctgtagtgaccgcttgtcttcattttatcaggattcctgatgagtcgagcattattgcatatgagaggatgtcttttttcgcttatgtcagcatcattgaggtaatggcaaaattgggaacagtatttctccttttctgggctgaagacaatcgtctggtgttgtacgccgttgcccttatgaccgttgggatattgttgaatatcatttatgccatttattgcaagcgtaatttcacgacttgcagattccggttctattttgacagaaagctgctgaaagaaatgcttttcttttcttcatggagccttttcggcggtatagcccatgtcgcatccatacaaggcatatcaatacttttgaatatttttttcacggttgctgtcaatgcggcaatgggggtagcctcgcaagtgttcagtgctgtcaatactttggttacaaactttcagaaagcggtgcagccacagattgtccagtcctatttttcaggggataaatccagatttctggaacttgttttccgctcgtcaaaattctcgtatttcctgctctttttcgtcgcttatccgttgattttgatttgtcggcctgtcgtcgagttatggcttgtctgtgtccctcaatatacagtacagttcattcagctttatctcatcttcctgcttattgatgcattatccggaagtctttgggtgtcatctgaaacaataggcaatatagccaagtatcagtttaccgtttcttcgatgataattatgaatattccgattatatatatattgttcaagttcggttgcagtcccgtctatgcggtgattgtcagaattgccatcaatttcattactcactgttacagaatattctatctcaaacacaaagtgaatttcccggttaggaggtatgtcgtggaagtgatgtttaggtgtctttgggtgtcggtctgcatcattccggtcccattctttttgcataaatttctaacctcaagctggggtagccatatacttgtcgtattgaccagtcttatcatttccggacttgttatctataaattcggacttgatgctaaagaaagagggttcgtaatcagtacggtaacaaataaattcatgttcttaaaaaaacaataaaatgtagggaataaaggtggtggcaacagtatacaatacactccgttgcggtttgtatccttttaaacagcagcttgttacggggcttttggaattccttaatttggtcaaattgcaatgtttgttaccggcggttcgtttcatgcgctcgttttttcatatgccgttctttgctgtcaatagagataaggacaactgcatgattacttttctcgataatatcggtttgcagaaacgtactatcagtgaaacagataaagaggaaaaatacaaagaagttctttgggcagattatagtgctgcggatgtatttcttgcagaagaaaggaagaggaacttaaacttttgaaataatggaaagggacattcgtatagacatacttaaaggcatcggcataatccttgtcgtttggggacatgccaccgcaatccttataaaggaaatttgtattttccatatgcctttgtttttctttttggccggtatgttttatcatcccaaacaaggatttattcaatcaagagcaaaacggttgcttattccctttggggaatattctctgatattcgctgtattttattttagcatggggttgcagggaataccgcttgataaactgagcatccatcatatcgccgcatttgatggtccgttgtggttcttggtcgctcttttttatatatgtgtcatatattattttttggacaaaaccgttaaggaaaaaaacgttattcttatcgtttcttttgtaattgggctggctgtcgcatattccaagatcaatttgccgttttatatcgggcaggggctgttctctttgccattctatgctgtcggcaaatggatgaacgacaaagggctgacacaagcagagggggcaattaaaaaagcaaccgttattgctatagccggatatatcatagccatagcgttctgccgtttggcacattatcaatttgatatttcgcaactgaaattttccagtttcccgtttatattctatgccggagctttctgtgccatatatcttttgttgaatttcaagcctttcaacaagataacaactacaaacagaatattggcatctttgggagctaattcactcacgataatggctatacacgctccttttctgtggttgttcagggattttatcagaacaaacagtagcttttataacacaaaactggggggggtaatttcaaacttaatcacttttgttatcttcataacattgagttatttaattgcccttggaatagaacaattaaaaaaactgacagctaaaaatcatggataatccgaaagtatcaatcattgtaccgatttatagagtagaggaatatattgagcggtgcgctgaatcgttgttcgcccaaacgtttgatgacattgaatacatctttgtggatgattgttctccagacaagtcggtggagatcttgcagagaactctggaaaaatatccgcatcgaaagaggctgacacgaattgagaggttgtcgtcgaacagcggcctgcccgctgttcgacgacaagggattcaattggcctctggtgattacacggttcattgcgatagcgatgactggatggatgtgcatgccataaaggaactatatacttttgccctatccggccattacgatatggtcttttatgatttctatcgtagtgatggtgtttctacatatgcttccgccccgcgcaaggtttctaccaataataaagacttcctgatgtcatcattgctttgcgggcggttgatggggagcttgtgcggcgctttgatcaaacgtagtctttacgatgggataacatttccaaggcaaaatatgaacgaggatctggcgacgataatccaattggtttggaatagccggaatgtaggatacttgatgaaaccattttattactatttttttaatcctgcgtcaattacaagttatggcagtgctgagatccagattaataaactcaatcagcgtaaggagaatcttgatctgattttcacctttcttcgctccaaaggtatttatgaaaagtatacagacgagataaatgcgctgaaagttggttcaagaatgtatcttgatagatatatgctgatgccgcgaatccgtcggatttggcacaatacatatccggaaatcaacagtattacagtcattcgtcacagcaagatgcgtactctcagtaaaatcgagtatttcggttctttgcttggtgtatatcccatattcaaataccttaaaaatatatggaaagacttaaggaaatagatattatcaggacgttcgtaatcattctgctcgtgctctatcatgctcttgcgccctattgcggtggttgggatatgccttcctacgcccaacccaatgaaggattttattggggaggaaaactggcatacagtgggatgctggaaacttttgtcctgatttccgggtatgtatttgccttttcgctccaaaagaaagtcatttctttccgattattactagccggtaagctgaaacggctgtttgtaccgtgtatgtgttggggcattatcatgacattgatattctttggtccgtcaaaacttcttaatctggaacatttttggaaaattattgggggatacggacatctttggtttcttccgatgctcttttggtgctttttaatggaatatggcatacagcactgtctcaagggacgtaacttgatgttagtactcatgattattgctattctgccttggccgggaattccgttccgttttaatcaatcgctttattatctgctttttttccatcttggtggaattttctttagaaatcgtgagcggctgagaactgtcaattggtcaacaatatgcattttatcggctgtttatatggggttattcattgcggtaacattggttttgggaatggacgggatgcgtccggaactggcatcggacttgaaagtaaaagttttaatcctgtttgtccaccatactcttaaaatggtaagctatggattagtcacaattatctatgtcgctgtatttataaaactggaagacagatgcaatggaaaactatacactgtatgccgaagtatcgcaatgaattcgatgggaatatatgtgatgcaagaaatagttctgagacttatctattatagaatggggggggtatttttgtataccaaagagttaactccgttggtcgccttcgtgggcactttcatcgtctgctatgtatcaagtgtgattatagccggatgcaaatacaccaaatttctgtgttagtatgaatgtgtcctattttatttacctaataaattacaacgatgaaatatcattacgaggcagttccggtactgttcaatatacttctgttttttcttatgctgtatccgtttccgaatgtgtatagatatggctgtgaatttagaaaacgatatacagacatcttggattatgcagtatacggtgtcctgctgatactgttttgcactttcggctatgcggacaacgatttctatcactacgaggggcttttcaaacgtatctgttcaaccggattaaacgtgcatcttgaacccgtttactattggttgatacggaatgtcacttcaaactatctggtatggcggtttatagtgtggagcggaacggtgattttgtcgttatggacaataaaacggctcaaacttgatgtgaggataggattgctgatatttgtgctgttttatatcaacattatttcagtaatgcgcggaaatttgggaattgccatactgttttttggcttttcattcattatcaggccctctcataataggttattgtcattcctattcggttgtttgttgattttctgttcattcttctttcacaaaagtatgttgttttcgattgctgcactttcggtaacacctttttatctgaataggaaaacggtaaaaatcagtcttgtcatattccctttcctgaccgttgtgactactttactgctggattatattattatgaacggactcatcggttttgatatagcagacatgaatatagggagctcgatgacgggatatgcgagcggcacaatgcggcagtcgaatatttttggtaaactgaaccaaatgataacctatatgccggtatacgcatctttggctcttatgactaagaagatagtttttgaagaaatggatgttccacggtatataaaggcattgttcatctattggtatgcaataacttatattgccagtctgtttttcttccaagaaacttcggtatggctctttatacgtttcataatgatgagctattttcctctttgtattgttgtgggttattattattctaatttcaagatgacacgcgagaaaagaatcttgatgcttttggcaatccttcctatctgttataaacttttctatgccttctataagaggttggtatgggaagggtacgtctttttctgacatgtttcgttagtttacacgtattaggatcacaataaaaaaattaaaaaacaatctgaatgaaaatcttagaaataattcctcaacttagcagtggcggcggagagcggtttgtggttgacttgtgcaatgagttgtcgaaagaacatgatgtgacattgatggttttgcactcacttgacaaggtggatttctatttgaaagaggtatcgaataatgtaagggtggtatcgatgaacaaacggatgggacttgacatcggtttgttatttagagtatatagatatatccgtagagaaaagcctgatgtggtgcacacgcatttgcgtgctattatgtatattgctttcgcaatcatgcgaaagaatggcgttatgcactgtcatacagtgcattccgctgctgataaagaagccggaggctcctttatcagcagcggaatgcggaagttctgttttcatcatgggtggattacacccattaccatttccgccgaatcactacatagcttccgaaaatattatggaatggatgctcctatgattttcaatgggcgcaatgtggatgctggtatgcttgtttcagacgaggtcaaggaacaatttaaacagtatagacatacaaataagacgcgagtactgataagtctcgcacgtattgaccctgtgaaacggcaaactctcttggcacgtgtggtaatgcggttaaaacgggaaggatacgacctcactgtattgtttatcggaggtgaacgtgatgcacagatgaccgcggaattgcgttcgtacaacgatgaagcaatacaattacttggagaactgcacaatccgcttgaataccttaaaatgggagatgcttatgcactttgttcctcgtatgaggggatgcctatttcgttgatagaggctattggtgttggctgtataccggtatgcacacctgtgggcggtatagtagatgtggtacacaacggtgaaaacggttttctgagtgacggtatcggtgaagaatcttattacaaaacggtaaagagatttctatccctcaccgatgtacagcttaaagacatgaagcaaaaagctcttgccacttatggtccattcagtatgtacgaatgtgctcgcaactacgtaagacttttcgagaaaggaataaagaaatgaaacggaaaaaattactcgttgtaggctcaattcccgatgagagcaacttattgaattatggaggtgcgacggtgttgatgaaaaactatcttgactatctagcctctcagtctgaatatgaatataggtttgtacaaaacaaccggtattcaaatcttcgcactcgccagcgtagtatgtggcgcaattattcatactttttcccggcatttttgtggagactgtttgggtgcgatattgtaatgttcaatttttctgatcatggtacaatttattatttcccattattgagcaaaatagctcgtttggcacacaaaaaagtcgtactacgtaaattcggaggttcatttgagttctacataaagaaaattggtcaaacccaattacaacgggcacttgatgctatcagacaaacagacttgatattctttgaaacccaacagggtattacacacctacaacagttaataggaaagagtgacaatatacattggttccctaatgtgcgtaaagcttcaacaatacgaaagaacccctcagactttcatggcagatgtgttttcatgtcgcatatcaacaaagaaaaagggatagaagatcttatagcggtatccaaactgttaccttcgaattatacccttgatatatatggtgagataaaagaggataaatatcgcaatatcaacttcaacgaaagcggaataacataccatggggttgtctcttccgaacaggttttaaaaactttagtagaatatgatttactgctattaccttcttatcgcgagggctacccgggcattatcatcgaagctatgtctgtaggcattccttgcgtatcaacctatgcaggtggaatacctgaaatcgtagaagacggttacaatggtcgtttagtaattcccggtgatgtagatgcgataaaacaagctatcttatcgattaacgcaacaaactattctcaatattcagggaatgccttgaagaaatttgaagaagagtttgaatctgataagacgaataaacgcatacttgaaattataatgcactaaatcaaatggctaataatattcttattgtcaatacaattaaacatcttcggttaaaacaaatctattatcaattatattatagactattttctcataagttgatggaatataatgttccccggcaatcttcattgcggatggtctcagttatcgcaaagtggtattgttacaatgtacccaagacatttacattcctaaatcttataggggattttaagtcatggaatgatgttagtcatgggatgctttgggcatacaatctgaattatatggattggttgttgcaacctgacatgacttttgaacaaggttcagaatgggttgaacggtttataactgatttgccaacaaacaggatcggtcttgatccttatcctatcgcactgcgaagcatcaactggatcaagtttatcggcaggcatcataaaaaagtggagagcaatcggttgcaacggtggaacgattccctttatgcgcaatgtaaattgctcgaacggaaactggaataccaactgcttggcaaccatcttttagaagatgcttacgctttgtttatcgcttcaatttatttttccgataaaaaaatgtatgacaaggcatcctgtctgttgtataaagagcttgatgaacagattttgcctgatggctcacattacgagcaatcaccgatgtatcactgcattttgctcgataggttattggattgctataatgcctcgattaatagaggtcatgagaaaatgtgtgagcttttgaaactgtatgtggtaaggatgttggggcatttggagagcatcgtgtggaaagacgatacgattcccttacttaatgattcggcatatgggatagcaccgacagtttccgaattgagagcatacgccaaaagattgaagttggaatggacccctttgcctatgaaagaatgtggctataggaagctttgttcaacacatttggaggcagttgtggatgtgggtaatattactgcgacctatcagccggggcatagtcatgccgatacgtttaattatgaattgcgaattgattgcagaccgtttgttgttgatacaggtatttctacctacaacaagactgcaagaaggcagtacgaacgaagtacgtcagctcataacaccgtaactgtcggcaacaaggattctagcgaggtgtggggaggtttccgtatgggtaaaagagctaaagtaagagtactatccgataccgaaaatgaaattatggcagagcacgatggttttaaaggatgtatacatcaacggaaattcactattaacgatgatgtgtttacaataaatgataagattgtcggcaataatatgacagaatgtatcagctatattcatttcgcacccgatattgaggtccttgccatatcgtcaactgaaataagaaccaacagggctaatatcgctgtatctggtgcaaattccatagaaattataaatgattttgtatcagtagaatacaatcgactagaaccttctaagacgataaaaatagtattttgcagaaatttaacgtatcaaatatcctgaattcaaacagacaatgcaacagtgtcgaattcattgttagttaataatttatatttttcctttggggtcatgtaacccaatctttttctcggtcttgagtttaagatgttttgaacgcgcattacctgttcattggttatgtccctaaagtccgtacccttcgggaagtattgcctaatcaaaccattgctgttttcattggctcctctttcccacgagtggtatggttttgcaaagtaaacaaaaatatttagtttacgtgcaatttcttcgtgaaaactaaattcttttccattatctgccgttattgtatgtatttggtctctaaaaggttccaaggcatcgatggcagctttagttagcgggctggcatctttcccgctaagtagtcttatccatactagtccagttaccctgtcgtttatagttaatagtgctcctttgtgattcattccaatgactgtgtcaatttccaaatcaccaaaacgtactttcttgtctactatcgtaggacgcttgtctatgtccacgcggtttttgataaaaccacgtccattagtcaatgcacctctcttcttatgacttcttccccgtcttcttaaatgcttgtataacaacttatctccatgctttttatcttcccaaatatactggtagattgtctcatgagaaactgtttccaagccctttgttcgcataaacccagtcacttgttctggactgaaatctttctttatgagtatatctacttgaattttcaagtcgtccgtaaacttcacgaagtgctttcgtgaacgcattctggacatatacttagcctgagcgagatccggtttgtaaatgccattacgtttatcactattacgacgtaattcacgacttatagtgctacgatgaactcctacaagattggcaatctcggttcttgactttccgctttgcagataagcggaaatgttatacctttgttcttcggttagctgtttcatattgcaactgaatgttggggaactggaagatgcaaagaaacaacttttccacaggggaacaaaagggaaagaaatcttctttctctgttcctctgaaaaattattcttttcgtatcttctcattgtcatcattctcactcctgttgcattatccgcttgaacttaggtatttcaggcataaaatatgaagattttaattgtgtcgttctactattctcccgagcttggggctgctccttcccgtataaccaatatggctgaagggctgaaaagtcagggagcggaagtggatgtgttaacttgtttgccgaattaccctcaaggacaaatattcgagggttatagaggccgtttgtcaaaaaaagaaaagattaatggcataaacgtgtatagatattggacttatgcaaccgtgtccaagaatccttttaagcgagcggtaagtatgatgtcatttgcgaccatgttatggttgtttgcttttaagataaagaagatccagggttacgatagggtgatcatccaaagccctccactaccagtggctggttcggccatcacgcttttcaaaaaaatattcgggcgcaagactcttgtgaacatatccgatttatggccactttctgctgttgagcttggagcaatgcgtgaaggtgggaagatatatgatattttcgcgtggattgaacgttatatttatcgcaatgcagacggtattttcggtcagtctgaagagataatccggcatgtgaatcaatttccttcgacaaaaaacaagtttgtataccgtaatttgcagcaatatgcggttgctgctcaacccaaaaggaagcacacgccctttcgcattgtatatgccggactattaggtgtggcacaagatatatattcaattatcgagaatattccgtttcagtctattggcgctgagttccacttgtatggtggtggaaatcagacagaaaagataaaagaatatataaataaacatcccggttgtttcgtgtattatcatggatatgtaaagaaagaacaaatcgccgaagagttgtcaagatacgatgcgtcaattgttccacttaccgtagcaatcaaaggagcagtgccatccaaaatatatgatctcatacctattggcatacctatactgttttgtggaggtggagaaggggctgagatcgtatcgaaatattattttggaatggtttcaaagccacatgatttcaaacaattacacaataatattattgagttgattaaccttcctgacgaagaatacagcacaatatcgaagaactgcctggatatggcaaaaaatgaattcgattttaacaaacagatatatcgctgttacgattttataaaatcaatctgatgtaaaaatataattcaatgaagaaagtaatgttggtcttcggcacccgtccggaggcaatcaagatggctccgctggtgaaagaattccagaaacagccagaacgggtggaaactgtagtatgtgttaccggacaacaccgggaaatgctggaccaggtattggatatattcgatatttgtccagattatgacttgaacattatgaagcagggacaagacttatatgacgtgacgtcccgtgtattgacaggtatgcgtgatgtactgaaagaggcaaggccggatgtagtgctggtgcacggtgacacgaccacttctactgccgctgctctgtcggccttctaccaacagattccggtagcacacatagaggcaggattacgtacacataacatctatagcccatggccggaggagatgaatcgacttttgaccggacgactggcgacctaccatttctcgcctacgccactgagtcgtagcaatctgatgcgggaaggtattgacgatcggaatgtcatcgtgaccgggaatacggtaattgatgcgctttattgggtagtggataaaattaagagcgacaaggcgttggattgtgaattggtagggatactggcaaaagccggatatgacgtgagccgtttgaatggtggtaagaagctggtgctgattacgggacatcgtcgtgaaaacttcggtgacggattcatccatatgtgtactgctatcaaagacttgacaaaaaaatacccggaggtggacttcgtttatccgatgcacttgaatccaaatgtgcgcaaaccgatacatgacgtatttggagaggaattatccgattttgggaacatgttcttcattgaacctttagaatatctgagttttgtctatttaatggaaaaatccactatagtattaaccgatagcggtggcatacaagaggaagctccaggactgggtaagccggtattggtgatgcgcgacacaacggaacgtccggaagcattggatgcaggaacggtaaaactggtaggtacggattataacagaatagtaaatgaagtatctgttttgattgacgataaagtcgcctatgaaaaaatgagcaaggcagtgaacccttatggagacgggcttgcttgtggacgtattgtgaacgcattgctgtacagaatataaaaagatgtgagattaaacctgaaaatcagactattaatattttttaaggtgatgatgattctgctttataagcggaaaacgaggaagatgcagattcgtccggtttctaatttcaaacgggtgtataacattcaaggattactatatgttgtcaccactaacttcggaagagaacgggcatgagaggcattttgaccgcaaccgtctgcaatatgattctggattttagtgtgaagaaaaggggaatggtaaatgaaaaaattcctgcgtatgggtgttccttttgggaacttttattgtttggactttctcctatttctgggtagcatatactagtatgagtgaatttatccatatttccagtgcggatataaataatgcagggaaaatactcagattggtgagcgtttttaagaaaaaatcaccctacccaaattttgattataagggaaactcctctatataaatcagctgtaaaagtaacaaggatgcctactgttgttgtccgttttgaacctaataagaaaaatcccgagcgtggtacaatttattaccgtatctacaaagggcacaaccagcgtatggagttttcttcccgtcttcacttgtcagcttcttcctgggatgaaacagcaaggacaatccgggatgattatcctgagtcctgtcgtttccgtgtccaaattgaggcggatcttcggcttttgaaccggattataacagaagatattaccggtcgactgacaatgggtgatatgatagccctctttaaacagcaaaggacaataatcaaatgaactttttgacttgtaagtaaataggatggtatcgtctttaacagattgctatctccgtctaggcttccaggtaacagaatccgaagagggactacggataggcttcaagccgggaatggtacatgccatcgtgaaggaggtccgaaacgaacgtcctttgactcgctcggatgctgaattgttctacgagaagttctctacactaagtaaagggcatcgaaatctatatttcaggatcgtggcacacggcggattcctgccggaagcattggactttgaactgcatgggctgaccgtttcggatgaaagctatattgaaagcctcttgtccggaagacatgtggagctttatccgcataacgaagcggcttacagggcgatcatgcggggattcaaacaacaccgtatcggtgcggtcgtgcaggctaccggaacagggaaatcctatttgctggcacgctatatcgcagatcatgcaaaggaaaagatattggtctttgctccgaacatcacgattctggatgagatccggaaagccgtcggattctctattccgcaagtgacgtaccggacattccagtcactgatccgtaaccgggaggacaatgggttgttacgggcagatcatattcttattgatgaattccaccatttcggggcggaaatttggggaagtgccttgcaggatgtgatagaaaataatccctgtgcctatgtcctgggaacgtcggcaacgccgatccgtccggagggaatgatcgatacggtggatctttatttcgaaggaaatttgttttatgagcttaccttgccgcaggcttggtattacaatatcttgccggttccggttctggtacagagtgcttacgggctggacaacgaactggaccggctgcaaagaaagctggaacgcagcggttgttcaaaaggacgaaaagaaaaggtacagaagaaactggatctggcacgtgtggatttcaaagaggctttgggggcaccggaagtcatccggaagttcctgccgacaagcgtacgcaagctgctggtattctgtcgcgatctcaccgatttgaagcagatggtgccagaagtatgcggatggctcacgcgagcgggacgtgccattactccgttcgagatccatcatgcccaaggtgaacggcagaacggccggatactggatgctttccgagaagaatcagaccggctgcacgtattgttttccgtcaacatgctgatagaaggactgcatgtggaaggtgtggatgctgtcttattccttagacggacagaatcatatatcgttaccttgcagcaattgggccgttgtctaaatgccgaggctggaaaacggccggtcgtcttggattttgtcaacaatctttcaggaaaatcggtttatgatgtgatggctccccacttggagcgtctatctctccttccgtcacccaaaggattcgaaggaaacacctcttttttgacgacgggtttcctatcagacatacggctgcgcatagaagagatattggcagaactggagccctggcagattatgtatgagaggctgattgaattccgtcgggaagaaaacgactggccatcaattacggaagggaaactcggtttgtggtgcaacacccaacgcattgcctataaacggggaaaattgcaggaggaacgccgccgtcagctagaattgatcggcttcgaatggaaccagctcgactccaaatggatgaaagaataccgtgcgttgaaagtcttctttgatacctgcggacgctggcccaaacgtgaagacggcccgcttgcaacttggtgttatacccaacgggaaaggcggaagaatggacgcttgagcaaagagcgcatccgggctttggatgagatcggctttgtttggaatcaagaccttcaaagggaatggatgaagaattacgaggagttgaagtcttttgtcggaaaatatcagcgtttccctaaatcgacggaggggaatctgggtggatggtgtcatacacaacgaaaaatgcacaaactggggaaattatcccatgatcgctggcttctgttggataaaataggatttgtttggtcagcggaacaagtctggcaaggcaactttgagcagttgcgcctgttccataaccgccaagggcgatggccaggttgccgtgaaggagcattgggacgttggtgtaccatccaaagacgggattaccgcaagggaaacatgtcagatgagcgaatagtacaattggagcggatcggtttccctctgagctgacaggaaacatctttgaaaccattgggttacgaaatacctaagttcaagcggataatgcaacaggagtgagaatgatgacaatgagaagatacgaaaagaataatttttcagaggaacagagaaagaagatttctttcccttttgttcccctgtggaaaagttgtttctttgcatcttccagttccccaacattcagttgcaatatgaaacagctaaccgaagaacaaaggtataacatttccgcttatctgcaaagcggaaagtcaagaaccgagattgccaatcttgtaggagttcatcgtagcactataagtcgtgaattacgtcgtaatagtgataaacgtaatggcatttacaaaccggatctcgctcaggctaagtatatgtccagaatgcgttcacgaaagcacttcgtgaagtttacggacgacttgaaaattcaagtagatatactcataaagaaagatttcagtccagaacaagtgactgggtttatgcgaacaaagggcttggaaacagtttctcatgagacaatctaccagtatatttgggaagataaaaagcatggagataagttgttatacaagcatttaagaagacggggaagaagtcataagaagagaggtgcattgactaatggacgtggttttatcaaaaaccgcgtggacatagacaagcgtcctacgatagtagacaagaaagtacgttttggtgatttggaaattgacacagtcattggaatgaatcacaaaggagcactattaactataaacgacagggtaactggactagtatggataagactacttagcgggaaagatgccagcccgctaactaaagctgccatcgatgccttggaaccttttagagaccaaatacatacaataacggcagataatggaaaagaatttagttttcacgaagaaattgcacgtaaactaaatatttttgtttactttgcaaaaccataccactcgtgggaaagaggagccaatgaaaacagcaatggtttgattaggcaatacttcccgaagggtacggactttagggacataaccaatgaacaggtaatgcgcgttcaaaacatcttaaactcaagaccgagaaaaagattgggttacatgaccccaaaggaaaaatataaattattaactaacaatgaattcgacactgttgcattgtctgtttgaattcaggatatattcccaaatgttatttgcaggaaatagtatagtgataacctgtgtaagcagatatagagtctaattttatgaataaatacgcataaaatcagaattcagatattgtacataactgataggaattctagacacttttaaaagatgttattaccaaatttcgtagacatggaaatgaaattgtcactgcatataaatgacgatttacaaaagacggttattaccaatgtcatgactcttgtctgtcataataatgtaaggagcattattatgaacatcttttgactttcctttgaatgaagccagtttgaatatatagggtatggttacaatttaaataatctttatgccccactcggaatacttgattggggtaattttaaatataattgtcggttctgcaatcactagtagaagcaatatacaggaattctgaatatgcctttttcggtaactgcaaattgattatacaatcccccccccatacacatacacttaattcctcaacctctctcttgaatttttccaatcctttcccaaactttttttttattttttccttcaaattttttccctaatctaaaaaatgtctatctttgtccatagaagagttcctcataagtatgaggttgtaaaatactgaaattagcacaatctccaaatcgttaccttagacttttcagaacttccataagcgtttgtctttcaaattaatccatcaaattgataagaatttaaagtaaaaaataaactttttttgtggctttcttatgatttgtttcccaaaatgttcaacatagtgtgtaaaataaaaaacaatcactctaatatacactcctgaatggttttagtaatcagtcaattactatttatgtattcggaagacgtgaaggtgtgtcaaaatgcacaccttcattattttacgtacaaagccccgactttcacaagctggggctttgttattacctaaagattctgtatctttaggcataagaatttcactatgacaaagatacattttcgtccttacattcccaaccaaaccgttctttttcctcaaagaattgatgaggatattgcagaaaacgatccggtgcgcatggttgacgccctggttgagggcttgaatcttgaaagtttcagaaagctgtataaggaatgcggccgcagcccttaccaccccaagatgatgctcaaggtcattctgtatgcctatatgaacaacatctactcctgccggaaaattgaaaagcttcttcaccgtgacatccattatatctggctggccggatatgagaaaccggatttcattaccatcaaccgtttccgcaaccgggtgaagaaggaaatcaacgaggtgtttacgcaaaccgtacttcttctctcttccaaaggcttcatcagcctgaatgtggaatacattgacgggacaaagatcgaatccaaagccaacaagtacactttcgtctggcgaaaaacggttgagcggaaccgtgaacgcctgatgaagaagatacatgtcctgttagggcagatagacgatgtcattgcccgggagaagtcatcagagaacaatgaggaggttgagttcactccggccatgctgactgaaatggcaggagaattgcgtcatgcattggaacaggtttccgagccatccgcgaaagaggaaaagactgaactgaaaaagaaacgcaaacagctgaaggaactggaagaacacagggacaaactgcaggaatacgactgccatctggaaacactgcaagagaggaattcctattccaagacggacaaggacgctacttttatgagaatgaaggaggatgccatgcgcaacggacagacgaagcccggttacaaccttcaaatcggcaccgaaaatcagttcatcaccgattttgcactcttcccgaaccctacggatacactgaccctgattcctttcctgcaatctttttcaaacaggtatgaccggatggcccatacggtggttgctgattccggctatggctccgaagagaattaccgcttcatgtccgaaaacggcatggaagcctacgtaaagtacaactatttccacatggagcagcggccgagattcaaaccggacccgttcaaggccgaaaacttctactacaatgaagaacatgacttctgcatctgtcctatggggcaaaggatgcggaggataggcaccaggaatgtgaaaaccgcatccggatatgtcagcgaaaatgcacggtacagagctgtcaggtgtgaaggctgtcccctgcgatgccgctgttttaaagcaaaaggaaacaggacgatagaactgaatcataggcttagacaatacaagcggagagccaaagaactgctctgctcagagaaaggactgaaacacagagggcagagatgcatagaaccggaagccgtgttcggacaaattaaaaacaatatgaactacaaacgtttccgacattttggaaaggacaaggtcttcatggactttgccttcctagccattgccttcaatataaaaaagatgtgtgcaaaactgacaaaagaaggtatgaactggctgataggatggttttatgagcttactgtcgctttatttagatgctggagacacataaatcaaagaaatcttcgaattatcgcagcttgaagaaaataaaccgatttatatcggtgataaacaagaaagaaggtgcatcgtgcattacgacacaccttcctatttaccatggagaattggtggagtaaatatgcctaagtcatgagaaaacagcttgtaaaaagcgaaggtgttttggtaaaatgtcataagcacttcaaagtatatgccctccacaaaataaacagtgatgcttttctcctagaggtgtattggtaatgtgtacacaaatatggaatcaatatgaaagcgaataaaatcttacttgtattcctgatattttatgtaggccatatccaggcacaagagatacaggattcggtaaaaatctatttcagacaaggatattctgtattggaaccatcccatagaaacaacagagaagcgttggaccggatagcagacagtctgcggacaagctatgcggactctgtttaccaactgaaacgtatccaggtagtgggtggagcatcaccggaaggcagcattctcctaaacagacgtttatctgtaaagcgagccaatgtgctgtttgactatctttcacgttatggagaactacccgactccttgaaaacgaacgtgttcctcgggagagactggaacggtctaatccgtttggtgagtgatgactgggaactaccctaccggaaagaaacgctacatttattgcatgaattggcagaggatgcggcaaatgacaatcttacaaaaggtgaccatctgcgacggatacagcaactgcatggtggggcaccttatcggtatatgtataaaaaatattttccggagttgcgcgcctcccggttatatctatggtatgagaaagtatggaatcctattgcccccatgccaatgcctcccttcaagcttcctatacccgaaccaaaaccgacagaacctctcccccttgtcccatacatacctacgcagccacgtaagctgtatcttgccgtaaagacaaatatgctgtacgacgcattgctcgtaccgaatatcggtgtggaattttatcttggcaaagactggagtatgagtgctaactggatgtatgcctggtggaaaacagaccggcggcactggtactggagaacttatggcggtgacatagccattcggaaatggttcggtaaggccgccaaggaaaagcctcttacgggacatcatgtgggactctacgggcagatttttacttatgattttgaaacagggggaaaaggctatatgggtggaaaacccggaggaacactctgggacaaaatgaactattccacaggtgtggaatacggctactcgttgccggtggcatacagactgaatattgacttcactatcgctgtcgggtattggggggggacctattatgaatatacccccatagacaactgctacgtatggcaggctaccaaggagcggcactggttcggccctactaaggcggaaatatcgctggtatggctgattggcaggggaaacttcaacaaagggaaaggaggcagacgatgaaaaccggaatacgaatgactgtttacacactgctgaccatgattcttttctcatgcgagcacaaggaactctgtttccatcatccgcatgtggctacggtcagagtggattttgattggaagaacgctccgcaggccaatcctgagggaatgtgcgtgtatttctatcctgaagaaggcggatatccggttcggttcgattttgcagggaaagacggaggaccggtagagattaaagtaggaaggtaccggatactctgttacaataatgacacggagtctttactgttcagaggaatggaaggatttgacacccatgagggatatacgcggaacggtaacgtttttgagagtatttacggtaacggtgcccattatgcgcctccggccaaaggttcggaagacgagcgtgtcgtcatctgccctgacatgatgtggggaagtaacgcccgaaatgtggaaatcaccgaatcagggctaagttatgaatgtgttccctttacagacaaagacaaggtcgaatggatagaaagtagcgagcatgtcatcaagctttatcctgccgaactgatatgtacctacacctatgaggtccgtaatgtcaagaacatggagtatatgacgcaggcttgcgggtcattgtcgagcatggctccctccatgctgtttgccaacgaggaactggacagggagtgtgtcacagtccccttcgaaacagaactccaccccgagagttcgaaaatgaccggtaagttttatacgttcggtcatcatgaagagaatgcccgtccgcacaaaatgatgttttatgtatggtattccaataaggagaaattctatacaacctttgatgtgactgaccaagtacataaagcaccggacaggaagcatgtgcacatcatcattgataatgcggactttccggaaccgcttccggacgaggggggatttgatgtggaggttgatgattgggtggaagtcgaaaacgatatcattatgtagttttttatatcttttaatgttatgcagacgaaatcaattctaatggcactattggccatggcattggtaacggcatgtaccaatgatgaaacaatagaaatgaaccagggtgaaggcatcagtttgagtgcgatagcaggaaaggcaatccgtacgggaagcgaagccaccacaaccaacagcatagacaaattccatgtatttgcctttacccaagaagcagaatacatgaatcacgatgtccggagacaagggaacgtatggtcgtatggcgataccaaattctggccggaaacagatgtggacttctattcgtatagtccgacggatacgaagaatggtaatgttgacattacagtaaatggcgacaagaaaattaccggctatgaggtacccggcgatgaggacctgctttatgccttgaacctggctgaaaagaaagccgaacatgagggcaaacaaccggttacggtcaacttccgccatgccctgtcacagattgtattcagaatcaagaacaccagttccaacctgacagtgttcgtagacgcagtgaaagtggagggaatagagaaacagggtacattctcctggccgactttgagcactactacccaatggcagggaactgaaaaggatacggaaactgacaagtcatggggaacatgggatatcgcatataacaaagagaacgcaaagcagaacagctatgccgctgagattactccgattatggaaccaggctttacaggttccaaagatgcatctgtgtgggacttgactgttaaaacaggcaatggctataagggactgctccttttgccgcagacattgaatccctggattacgaagaccggtggaacagatgaaaatccggagtacaaaatcacggggacagcacgtgtgcttgttaaatgcaagctggtagatacggcatctgatgtacaattgtggccagacaaggactcacaagaggaaaccgcatgggtgggcgtctccctggtaggagaacctaaggacataagcggaaaaaacgaacaagtctggaagcagggcaaacgctatgtttatacccttatctttggtgagggcggcggctttaaccctgatcccgaaaatccggatcctgaacctgttttggttcctatcacattcgacgtaactgtggataactttgttgaatatcctcaggacctcgatgtaagcgttcctgattcaaaccccggaaaataaactgaaccaccgcaaacctgtcttttccatccgtcgggttgcggaaatataacagaccgggcggggttgaatgttcccctcccggtcactacttattcaaataaaaaataaatgcctatgcgacttaattttaaaaaggattttcttcttgttacggccatgctggtcgctgccggctgttccgatagcatgacgggagaaaacaatccggaacaacaggtgccgattgcctttggcacacaagttgccacccgcgccgtggtggaaagtgacaaggagggcatggataatttcacactgtggggatgggtacgggaaagcgacgggccgaaactgtttttcgatgccgcttcggttactccgtcgggaaactatggcgagaaacgtttctgggctgtaggcaggccttatgacttttatgcggtgcatccggaagaaatgaaagagattggtgtcgctaccgaagtttcctgcaacgacaagggcgaactcagggttacgggttttgattcttccggaatggggaaggatgccgtggatttgatgacggcaacagagacagacgtgacttatgagggtggcggaacgatggcgcctgtgcttctggcattcaaacatgaactggcacaggtgaaattaactgtccgtaccggagagaagcaggcggaagtgtcggacatcagacttttcggtgtggactataaaggtgacttgctgtggacgccggaaaactcgacatggcaaaaccgggtgaaatgtacggaagagaaaactcttttcgtacgcagcgggagcgtgcggatagaagccggaagcagcgctaccgtgctggatggcgtattgctgttgccgcagccggtgacggaggatgtggcggtaacctttaagtatgcctatgccggcaaaccgctgtcggaggcaaaagaagcgatggtatacctggatgcggccctgacaacggaatggataaagtcgaacacttaccattataaaataacgctgcctgctgccgatgccgacattactgtcaaagtgaacgtgggcgattgggacagcaaggatatttcggcagattggtaatctcataaacaggaaggagaagatatgaaaatcctgaaatactcatatatatgtatgttttccgcaacggcggggataatgacggcttgtgcaccggacgggcaggaagggatgtttcccggaaagggagaaccggtgacggtgaaattttcaatcgatacaagggcggcagaaacggatgatttcgactcgcaggtgaagacgctcagggtgtatgctttccagaatggcagcccggtggggtattattatggcggggaggatgtgccggctcatacttttaaatggaaattgccgaaaggagaagtctggttttatgcagtggccaacgagcaggaggccggagaactgctttgcgaaaacaagggagacatttttgtactgcccggtgagactgtcgggggagtacatccggtcgaaggcttggaagtagtgccggacagactggagtctttgactttcagccggctgccggaagcggaatatgtgtcgggcggaacggcaacagacaaggatgaaacgggaaaaaaataccgctctgccattgtgccaatgacctgtaagtatcgtggaacagttacgcacgataatcaggagataaacctggaactgaaacgcagcatagcgaagctacagctttactttgccaaggcggatgtggcagacgccggagaggggcagctctatatggggcgcgggttgtatctctacaatatgccggaatacgggtatctgtttccgaaagagaagtacgaatatacgggagatttcaattttctggagggagccggtgaaaattccgactcgaagaatcagaagaacggcaaggtaattctgagtgcgggatggccggaggaaccggaaatcgctccgcaagaagggacaccggaatatgaggagtatgaaaagaacttgcaggagaagacccatatcaacgagattaaggctttggcacatgccgggaatacagacacgaaaaactttcagtggatgccagccaaaccgatttatctgtttgccaactccaatgaaattgcagaccgttatcctgagaatccgtcagctgagagttcaaggggatattatctgaaaatactgtcgcatgaacataaagtgggaagtgacggtacggaaggacatgaggctgatatgcaatatgtagctttgcccgaagtggaagccaacatgaacctgcggctgttttccgttatttccatgcacggacacgtggctatgacagcacattggatgattgttccgtgggaaaccggaggcggagatgtggaatttaattaggcagacgaataacagacaaaaatatacagcatgatgaaaaaaacagtgaatcatattctagtggcgggactgttggcgctcctgtcgcttgcatcttgcaccgatgagttcatcgaaggaaactacttgcagggagtagaccgtgacaagcgggtggaggtgaggcttccgttcggtgtgggacgtggcatcactaccacgattacaacccgtgcggcaggtggagagattgattatgactcccagctttcgggcgtgatggcttttgtatatgaagcgaagagcgacaatccggaagaaaatgagttgttggcctatcatctgttctccaatccgtccaataagccgctggaaggtgctaccggcggatggatcgccgataatgacgaccctacatgcggtgaaatcaagttctatgttccggtgggtgatgtatacatctatctgttgggcaatgcgcaaagttcgttccttaatttctttccgggagtatcgggtggggatgcgctgggcactcaggcggagttttttgaaaaagcaaccccgaagtggaacggaaatatacacagcgtagacggttatctgccgcttacgggtatggtgaacaacaatacaggattatgtcatgtgaacgaacagggacaaatcagttatacggatgaagagggaaaaactcatatactgttgccggacggtaaacacgatgaagacaattcgtttgtgctgaaacgcctgatgagcaagattacaatgaatatcagggaaggtaaaggagtgaagtttacggcgcgagattacacggttcgccatatacctcattatgtgtcgcccaccgcacaggcgtggacggaagaagagcgggaccgtatcctggtggaagatgccaagccggtgaatttcggtttactggattctctcacttttactatatacctgccggagaacatacgcaaggtaagatccggcgtggagattaccgaatacaggcagcgggataaggtggtgaagactgccgacaataaaaatacggaagagaccgctcccgatgattttcatgctgataatgccgataatcacaaagggcactacaagtttgagtttgctccgaaagcttctacttatattgaactgaccggatggtttgaaaatgcagacaagacggttgctgccgatgtccgttattatatccatttgggtaatttcgggaaagacctcaatcacttcagcgtggagcgcgaccatcactatacgtataatgtaaccatcaacggagtggatgatatagtggtggaagtggaagatgagaacgaaaagactccgggagcggaaggagtggtgttcaagcatgaggctttcgcacatatcgatgcccattttgaccaggtggagatgaaattcatgcggaaagacattgagaatggtgtctatctgtataccgacacacctttcggggtcatgggggtgatgtattatcctaaaggtacccccgacggaggtgcggaaggcaaatgtgtatccgtgagcagtttcggtattaccaaagatgtggcacaaggctatctggcgtggctggagtttgcgagagagaagacaccggataactatttctataatggaacaaaaccggataaagaaagcccctatctcctggaatactatcatcctgacaaggtgaaaagtgtgttcgatgcgctcgatgagttttatgcaagcaaggaggattcggcgtactacacctgctttgtggatgagaacttttatgagaaacatcccgacccgcgtattacggcatcggtgcatctgaaagattttatcaactgcaaggaccgtatcttctcgcttgctacggacctcaagttcagccaagatggtaagagcgcggtgtcgcagtcggtttatacgctgaaacaacgttccattgcctgcttctatgatatgaacgatgagactctcaataaattcggcttggagtcggtggaagagcagacggccatcctgtatgagccagaatcggaccagagggaagtttgggacggcagaaagaatacttggcaaaagctggatggtcaggttggaaattgtaatatacatggtatggaatgggggcttaaaacatcacctttcctatccggttttatactgaggaaagatggaagtctgaaggaatcccgaccgattagcggacaggccgacgatccggttatcatgctgatacgtaaccgtgatttgaacggcaacggctatctggacgaggaagaactgcgctggtatgtacctgccatagggcaattggtgggtatgtggctgggagagcctgccatcgcaaaagaagccgccttgtggaaagcgtctttcgatatatatataggagcggaagggaaagagataaccgacaatcccgtacagggatatacggccagtacacacggttcttattccacaatatggtcggaactgggaggatacataagtcatacgtatctgagacacatgattagtgtgaggagcttgggaagcggagtcgtgagtggcaggatggacagggaagtttcgtctccttattacaaatacgatgaagcaagccgtacgctggaagtctttttggcggacgaagccatgcgctcgttcagttaccgggagcttcagccccataacgaacgcgatacgcagaaccgtctgtacaagaaattccagctggcacaagaacccatgctgatggatacgattgcggaatttgagtgcactgacccgagtcacctgagatttgataaagatactcccagtaaggtaacatggacaggtacgacattgaaacttattgagatagacaatgccaaacgagataagtttaccatagcccaagactatcacgaagcaggagacggagtgacccccgccggagcgtggcgcttgcccaatgaacgcgaactgacattgattcagctggcattcaacttcttccaggatgaggacaacctgcctttctcgcccatggtgaagccgggagacgaggatgccgtaggtgatgcttacggctggtacaacccactcagtctgacatgcgatttaagtgataaaaggaatcataactttaagcaccggctttgcgccgtgttccattgccgtacggcgtattcttacagccgctattatcccggtagacacgaatatacgcctaccggttacatactgaactattggaagaccgattcggaaggggagttgctgaaaattcgccgggtagaaatgcatatgatgcgctactattcagatgagagaggcatggtggaggaagacaaggaagaacggaaaaaatacggcagagccggtgtgttctgtgtgcgcgatgtgagatactgatctgtaggaataatcggatagttttccttcaaagaatctattcgaaaatgccagagattgtcaaattgcatatttggtaaaagattgtgggtttaagtatgccgatgaaacattccatcatcggcatactcattttttaaaagcatactttttagcatgattaatttgtaaagtatcaatagatacgctacactttttcttttcgtaggcaaatcttaatccgtatcttcgtagcatgaaagaagatatacggaaaatacggatgcgccaaaaatggcttgagctatatggttaaacgggttctatgacaaagactgcccttcggcgagggattcctgtttcacgttatacccttggataaatcgtgagaaagaacaaggcaagtcggatttgtccgataagtctaaacgtccatcaagacttgccaatgtgaagataacacctgaaattgaaaccactatccttaatctgcgtgagacgagaagatgggggagcgcaacggattgccaactatctgcttaggaagagaataaagctctcagccatgacggtgtggtatgtgttaaaaaagcatcaagtcaagactgttgtgaaacgacgtaaaaagtcagcctgtacacgatacagtaaagaaattctaggagagagggctcagctggatgtaatgaaagtacgaaacggggcataccagttcacagccatagatggttgcacccctttgagaactattcgtgtatatcccaataaaaaagcagaaagtacaattcatttttaaattcataaaacatagaaacaagaaaactcttattcaataagctgtgaacaatcaaaatatatcgcggattgttttacgcttttaaattcatcggtcggggaacggccagcgctcttgtcgggaccacccgtcccgacaagaataaaaattcgctaatgtagcaaatctgttgttatggcacagataaaacttacatcaatgatattttgatttggttattaaggatcatattattatttgattctagtttaggaagcagtttacttactttggctttattcttctcccattgattggggtaccttacatcttgtagatgtacgcacttgttcgtttttgatttttactatgaagtaaaacattattgattttgtctctttaggttttactaggttatggtaggggggtatcttttggacaaaacattgtttgatttcattgtttgaaatcattgtttcagctttcttaatagaatcattatttgatgtttcagaatgtgccataatagggtgttctaggcatataggcataaaataagacacacaactattgctgtatgtcttactcgtggagcgtatgagactcgaactcatcacctcgacactgccagtgtcgcgctctagccagatgagctaacgccccgttgccaacgtttgcaggcttgctttcgtttttgatggtgcaaatataatgcattattctgaaataattgctatgtttgcgaaagaatttgaaaaaataagttatgctgatatataataccacttatcatgtagaggaaggagaagacaaaaacttcctgatatggatgcaggaacactatcttcccgaggtagaaaagaacggaacattgtatgctccacgtatagcccgtatcttgagtcatattgaagaaggaagcatctgctattctgttcagtttgaggtggaaaactctgccaaactgcatcgttggcatcaagagcaaggagtgaaactgaacgaggaattactgaatatctttaaagataaagtgattggctttcctacattgatggaggtaatagtgtgatacaaccggtcaaagagaaaataatattgggtatagaccctggtaccaccattatggggtatggagtattgcgtgtggcaggtgtcaagccggaaatgatagccatgggaattatcgacctccgcaaatttggagaccactatctgaagttacgtcatattcatgaacgggtactgagtatcatagagagttatttgcctgacgagctcgctattgaggcccctttcttcggaaagaatgtacagtccatgttgaagttggggcgtgcgcaaggcgtagcaatggcagctgctttgagcagggatattcccattacggaatatgctcctttaaaaataaagatggccatcaccggaaacggacaggcatccaaggaacaggtggcggacatgttgcagcgtatgctgcattttcctaaagaggatatgcctacttttatggatgcaacggacgggcttgctgctgcctattgtcactttctgcagatggggcgtcccacggtggagaaaggctatcatggctggaaagactttattgccaaaaatccggataaggtgaagaagtgataagaattgaaatgtagaatctaaaaataatatcatgaaattgaatgaacttgctatcattggagtggccgcaacgacggttgtaagctgcactcccgcgaagacggagtatgcttcgtacgaactttaccctgtccgttcgggtagtctgacagagatggaatatacacctgctgccacgcaattcacattgtgggcacctacggcggatgaagttcgcctgatgttgttcgaagcaggagacggagggtatgcctatgaaactatttcaatggaatcctctgaagaaggaacttggaaaactaaagttgaaaaggacttgataggtaaattctacacattcaatgtgaaaatcaatgataagtggttgggggacactccgggtatcaatgccaaagctgtaggggtgaatggaaagcgtgccgccatcatcgacatgaaatccacggaccccgaaggatgggcagatgataaacgtccggcattggcctctcctgccgatgtgattctttatgaaatgcaccatcgtgatatgtccattgatccgtcgtcgggtattgagcataaaggaaagttcctggcattgacagaacaaggaacggtaagtcccgacaagctggcaaccggcattgaccatctgaaagaattgggagtgacacatgtacatctccttccgtcttatgactatgcctccgttgatgagacaaggctggacgagaacaagtataattggggatatgatccgcagaactacaatgtgcctgacggctcttattctaccgacccctacaaaccggatgttcgtatccgggaattcaagcagatggtgcaggctttgcacaaagcaggtatccgtgttgttctggatgtggtgtataaccatactttcaatacatccgacagtaattttgaacgtacagtgccgggatacttttaccgtcagcgaccggacggaacgtatgcagacggttcggcttgtggcaatgaaactgccagcaaccgtccgatgatgcgtaaatacatgatagagtctgtattacattggattaatgaatatcacattgacggattccgttttgacttgatgggtatccatgacatcgagacaatgaacgaaatccgtaaggcggcaacgtctgtagatccgaccatatttatatatggtgaaggatgggcggcatcggctccacagatggcggaagattctctggcaatgaaagccaatacttataagatgccgggtgttgctgctttctctgacgaaatgcgtgatgctttgcgcggtccgttcaatgacaatcatcaaggtgctttccttgccggattgccgggaggagaggagagcataaagtttggtattgtaggagccatcaggcatccgcaagtaaataatgactctgtgaattatagtaaggctccgtgggcggaacaacctacacagatgatcagctatgtttcctgccatgatgatatgtgcttggtggataggctgaaagcaagtatcccgggtattactcccgtagaattggcaaagcttgacaaactggcgcaaacagccgtattcacttcccaaggtgtaccgtttatttatgccggtgaggaagtgatgcgtgacaagaagggagtacacaatagttttgagagtcccgattccatcaatgcggttgattggagacgaaaggcggagcatacagatgtatttgcttattataaaggtttgatacagcttcgtaaaaagcatccggctttccgtatgggtgatgcggatttggtgcgtaagcatttggaatttctaccggttgacggcagcaatgtggtggtttaccgtctgaaagaaaatgccaacggtgatgcatggggagatattatagtagtcttgaatgcccgtaaggagcctgccaaacttaccgtacccgaaggtaaatatacagtggtctgcaaggatggttttatcaatgaacaaggtttgggcacactgtacggccccgaagttgttgttccggcccaatcggcactgattatgtataaatgatgattggatgatgcagcaacatacaatacacatagcggggggcgtagtacgcaacccgcttgttcgtttgacagagcctgtcacccttgattttctggcaggagaacacattgccattgtaggaccgaacggagccggaaagagcctcctggtggatatgctgatgggaaagtatcctttgcgtgatggtgagcttacctatgatttctctccctccctcacgaaaactgcctatgacaatatcaaatacattgccttccgtgatacttacggttctgccgatgccaattattactatcaacagcgttggaatgcccacgaccaggaggatgctccgctagtacgcgaagtgctgggagaggtaaaagacgatgccttgaggcggcagctatttgaacttttcagcatagagccgatgcttgacaagaaaatcattcttctcagcagtggggagctgcgcaagtttcagttgactaaagctttactgactgctccccgaattcttatcatggacaatcctttcatagggctggatgcgcctacccgtgaactgctttttaatttgctggagcggcttacccggctgggcgagttgcagattgtccttgtgctttccatgttggatgacataccttcatttgttacacacgttgtgccggtagaggagatgaaggtgggcgaaaagatggaacgtgaggagtatgtgcaggcattctgtgcggacaatcagatgcgtattcaggaagaggccggagcgttggaggaattgcagcggcgtattctcgatttgccctacgaacatgcgaatttcacttcggacgaagtggtgaaattgaacggggttagcatccgttacgatgaccgtaccattctgaaggagctggattggacagtgatgcgtggtgagaagtgggcgctgagtggcgagaacggtgccggcaagtctaccttgcttagtttggtttgtgcggataatccgcagtcatacgcctgcgatatcagtcttttcggacggaagcgcggaacgggggagagtatttgggaaatcaagaaacacatcggttatgtcagtccggaaatgcatcgtgcttatctgaagaatctgcctgccatagagattgtcgcttccggtctgcacgacagcatcggattgtataaacgtcctcatgccgaacagatgtcggtatgtgagtggtggatggagattttcggtattgccgccttgaaagacaatccttttctgcaactctccagcggggaacagcgtctggcattattggcacgtgcttttgtcaaggacccggaactgctgatattggatgaaccgcttcatggactcgatacatacaaccgccgtcgggttaagaagattatagaggcattctgccatcgttgggataaaacgatgattatggtaacccactatgagaatgaattgccgcaaacaattactaaccgtttattcttgaagcgaaaccgctgaccggataataattacgtcaagcaaagataataaaggactggcgggaaccatttatggtgtaaatcgttatatttgtaatatcaaccatctaaacatttatatcatgaagttttttattgatacggcaaatttggaacagattcgggaggcctatgacttgggcgtactcgacggagttaccactaatccttcgcttatggcaaaagaaggtatcaaaggagtggagaaccagcgtaagcactatgtggacatctgtaatattgtgcaaggcgatgtgagtgccgaggtgatagctaccaactatgaaggcatgattaaagagggtgaagaattggcagccttgaatccgcatatcgtagtgaaggtgccttgcattgcagaaggtatcaaggccgttaaatacttctcgggcaaaggtatccgtacaaattgtactctggtattttctgtcggtcaggcattgcttgcagccaaggcaggtgcaacgtatgtttctccgtttgtggggcgtctcgatgatatctgtgaggatggcattgcattggttgcgaagattgtagagatgtaccgttattatggatataccacccaggtacttgccgcctctatccgtcatacggcacatatcatgcagtgtatagaggtgggtgctgatgtggctacttgtccgctttcggccattaagggtttacttaatcatccgctgaccgattccggtctgaggaagttccttgaagattacaaacgcgtgaacggataaacttaaaatatcctataagcctatctttcaatgtaattattgactaatattggtgagaaatagaataaaaagatttatttttgcgccttatatttagatatacaataaggcaccgatgaaagataggctcataggatttattaagacatactgcttgtttgtctgcatttttgtgttgcagaaaccactatttatgctgttttacgaatcgctgtacccggatgcctcgtgtgcggactggttcagtgtcatttggcatgggttacctttagacctatctctggctggttatctgacagctattcccggttttcttttcataacctctgtatggacactttctaaatcccttcatcgcatctggtgcggctatttcctcttcatttctgttcttctatccattatttttactgtagatttaggattatacgagtattggggatttcgtttggatgccacaccgttgttctatttcttttcttctcctaaagaagcagtggccagcgtcagtatctggatggtgctggggggaattgttgcaatggctgtttatgctgtcgtgctgtatgttgttttctacagcatcttgttgcagaagaaactgttgctgcagatgaaactgccttatcgtcgcctgaaggtgtcaggtatattgttgctgatgacggggctgctgtttattcctatccgtggaggctttacagtatctaccatgaatgtggggaaagtctatttcagtgccgagcagcgtctgaaccatgcagctatcaaccctgcattcagtctgatggaatctcttgccaagcagaaggactttagcaagcaataccgttttatggaagctgcggaggccgaccggctttttaaagacatgcttgaacccgcagttgccggtggtcaaacggaagagacggattctgtgcggcaatctgccgattcgctgcatactttattcaatactcagcgtcccgatgtactctttgtgattcttgagagtttttcctccaggttgatgacagctttgggaggtgagccgaatattgccatccatctggatagcttgagtaaggaaggggtgctctttacgaacttctacgccaacagttttcgtacggaccgtggactggtggctatcttgagtggctatcctgcccagcccactacgagtattatgaagtatccccgtaaaacgcagtccattcctgccattgcaggcagcttgcggaaggcgggttatggtaccaagtattattatggcggtgatgccgactttaccaatatgcgttcctacctgatgtcatcgggctttgaagatattgtttccgaccaggactttcccgtaacggaacgtttaagtaagtggggggcgcacgaccatctcgtattcaaccgtctgctggaagacttgaaaaccgaagctgccgaaggaactgcagaagagaaaactcctcatttccgtgtcttgcagacctccagcagccacgagccttttgaagtacctttccgtcgtctggagaatgaccggctgaacgcctttgcctatacggatagttgtgcaggtgattttgtaagacagttccgtgagctcccccagtggaagaatacggtgattgtgtttgttccagaccacttgggagcttatcccgaacatatcgacaatttgtcggtagaacgctaccggatacctctgttgatggtgggcggtgccatccgagagccgaggcgcattgacgtctatggctcgcaacatgacattgcagccacgttgctggcccaattggcgctgccccatgaagagtttgtcttcagtaaagatatgcttaatcccgcttcccctcatttcgcgttctttaccgtacccgatgctttcggtatggtgacagcggacaaccaggtgatattcaattgccaggcaggtgctgtggtagtggatgagggcacggcaaagggaaagaacttgccgttgggcaaagcctatctgcagaaattgtatgacgatatagcaaaaagataaaggaagataattaaagtataagagtataaagtataagagtataaagtatgacagcacttatggatgtcttgcaaggggcgatagatatagacacaaacatattccttttcatcaatgggatgcacaacacctttttcgattactttatgagtgcctacagcggtaagtgggtctgggtgccgatgtatgctgccatttggtatgtgatgctgcgcaacttccattggaaagtgactttgttctgcatggtcggtctggcactcgtaattaccattgccgaccagacgggggcaacattgatacgcccgtatgtggaacgccttcgtcccgccaatctggaaaatcccatatccgacatggtgcatatcgtaaacggacatcgaggagggcgttatggattcccctcctgtcatgctgccaatacttttggcctggcattctttgtctggtttcttttccgtaaacgatggctcactgtgtttatgatgggatgggcgttgctgacctgctattcacgtgtctacttgggagtgcattatccgggcgatctcatcgcgggaacattggttggattgattgccgcatacattgtatatcgctttttcctgaaagtcagcgggtataagaccatgaagaaagtcccccatatttatgctcccatattggtgggcggattgacgatagttgggatattgatatattccacggtgatgatattgcaggctcagaactgatgatttatcgtcaccattgcttccctcggacgtatatttagtcgtgaagtgtagctttgcgtggtggaatatgttgtgtaagcatactcttttttgttgaacaggttgttgaggcttgcttccaatctccatttttttcttttatagataagggatgcatctgcgaacacggtgttgagatgtgcgtcccctcctaagtcattccggtaatgctcgccggatagccgtaggtctacctgcccgatactgaatgtgagatgtagccgttgtacgaagtccagtaacggggtgagacgggtatcacttcctatcttactgccgccatagcctaatgtggcatgatattccgcttcaaaaacatctgcgggcgaccagattattttaggctctgctttcagataatcataacgataggtctgcagaagactttgccggttaccctcgctgtcagccaggcgggtaagctgttcgccattgctgcgactgagtagtagggtgagtgaggttttcaaattccagtcgtatatacctttggagaaagtactgctgagattccagctatcgttatggttcggtagttcacgacgagtgtagacaatggcattttcggaaacactctgttcgaaaagagtattccggttgctgcggctgtaggttagtgcggcagtgatgaaaaattcctgtacagtgtttttgtactctccgtagagattgtaggtttgcgtgaggctggtagggaaaagtccgttgccgtctcgccaggtgcggtaatcagtttggtagagtcccggatacaagtcggagaagtcttccgccgagcgtttcagactgccataaagggagaacgtccaatgataatccagtttatagcgcaaatacatggacggattgaagaacaggaacgaacgctgttgtgagaaataccgatctgctttcagaggaagcgaaagtgtagccagccattttccacgttccagctggaagtagggggtaatatacaatgacagatgcgaagcattgaaatcattgggctgtcttgtcggagtatatttcagggtagcccgttctccttgtattcctgccttatattgttgggtaaatccatcatactttcgtagatatgcggcactgttatctgtgtagaagttgtgctggttgaatttactttttccttcttcgagtagtaaggatgcaggctggtaagcatactgtgtcgtcgaacgaaattcccaggttccgctttcccggtttcggataagattgaagtagtttccggcacttagctgtgacgtttgcagagtttgtcccagttcctccgaacatccgcgatttatttctccgtctacggtgaagcggttggatatataattccggctgctgttatcttcataacgcagttccagattagcgatgtcacttctcagacgataatggtaggtttcgtctatttgtatggtatctgtcggttgataatagatttgggtatttccccgttgctgtcggattagctcatgagtatatccggcttgcaggcgtaagctgcggtcatcattccatttgtacatacggttgccgttcagggtgtgggtttcattgaataataagcgattcttgtctaatggtgcgctgatgcccggctgggagagaaaaccggaaagcggaacttgttgctggccatttccggtcagtttggtttgctcgttgctgaggtccttgccattgttatttgtcttgtaattatagacactctgttttcctttacccagttgaagggcattcagtctgccttcccacaggattttgttgttgtcactccatccggttcccagagtaccgtttgctatccattgatcgcgtgctttcggatccagtttcaggttcaatgccacctcatcggaattgatttttcctttcaaggcctttactgactgatagttctccatgatttccgcactctttacggctttggcactcaggttgttgttgatttggttataacgtccgcctgtcacgtccattccttccacaaagtagtggtcgatggctttccctttatacttaacctgtccgttttcatctacatccacgcccggaagtttcttcaatacatcctttatgtgcacatctttagatgaagcaaactgtgccaagtcatatctcaccgtatcttttcgggtattgatacgtccgggacgtatttgtacttcttttaatacgatggcttccggttgtaggctgagattcaggattcctgccgcattgatattccgcatttctctcttatagcctaacaaagaaatattgagttgcagcattccgctatgcttccacggcaaagaaaattgtcctttggcatcggtcaatgcatagtctatcgttgtgtttccgcgtaatacactaatcattacagcttccagcggttgatcggtttctgcatctgttatcttgccgctcaacgtctgtgcgtaggtaggcgacaagaaacgaaagagaaacaggaaaaatagaatgatagtttttttattcatacactgcaataattgattgtttggcaattgaagtttgttgaattttttatacgattatggtgatttcgtaatttgttgattatcaatgcgtaaaaagaggatatttaagtatacgactgaatggcattcactatacgactgaatagggttcagtatacgactgaaatgcattcagtatgcgatagatttcacgaatgcttacgggtgtggagaaatattatcgttccagtggattataaggaatgtttttcgggttcttggttgcattgccgtgttcatcactaaccttgacggtgacgttcggcatgcttccggtgataaatcctaccggatcggcataataacgttcgtgcactttgttgtatgctttgcggttcatcggttcgtgcttctttccgtcgaaaagtatcggccgatatgtgtggcattgctctacacctgtggcagtgaatgaataatgcccttcactgtcttcggctttcagtatcagtccgggcagtccgcaaagcttccacggaccttcgctgacgggtatttctgcagtaaaccatgctgtccatgtacggccttttaattgacattcggctttgctgcaaaggtaggagaggacactatcgttttctgccagtatcttccactgcggacgttcatccgtttcttcgcaacgcaggcgcgtcatgcctgccacttcatcgagggtcgttacttttccggcaggataacctctgaaggttcgttcgctcagtttgcttgttccgtattgtttcagatgttcattaatcgtttcctgcgaggctttattggcgaagtctactgccagtacagagtcgcaaacatacttggtgtaactgtagaacttagagagatttttaccgacttccagcatcatggtttcttccgtaacattttccggcttttccgtattactgatacagcgcgtttcatattgcacaaggatttgtgcttcaccgatggtatcattctgtattttcgttccatcagaaacgatgatttgtgccttcgcttgtgatgcgaacaatatagcgagacacagattgaggaaaataattcttgcactcatagtttttacatttttagaggttttacatattgcttccagcgattattgtactgcaaaactatgcggattttgcttcagaagaggctgaaagttattactgaaatattactcaatgcataatatctgcctcgcacgtacctatatttgcaagctaacttctacctttgccggtactaaatgaaagtctttctaagtgagactaaaaaagaacaattatggaacaacggattaagatcgtttggatattctccatcgcatcgatactgcttattacctgcggacaggtctactggttgcgtaatcagtatcagtatatgaatgatgaacaaatcaatggtatttatgattgcatcttgcagaccgcccaacagtatgactctatccgtactccccaacccaaaaaggtgcttagcaataccaatatgttcttctatcagcttagcaaatccattgatttggaaaagcggaccactatcgacgaattaattttgggtgttctgaaagggcgggacttgaagagcttgggccaaaagaatatagaaactctcaaaatagagcagcaggactctgccagtacagatgataaagagagagaggcaaagcgtagggaatgggcattggcgttagacacccttttgccggaagagcggctcattgcgaaggattcattcaaaatcaatatgtccgataaagatgctcctaatttgaactctattattaatctttatcgtttggagttggatgtgccttttgcgttgcagcaatttgattccttgcttgccatacgtttggacaaacaaacgtttactacgcatctggtggtttccgaagattccatttaccagtggaatgcggaactgaaacggcaaggtacattgttcaatccatatatagaagtaatgtatccttataatcccctgaagcgccagtttgtgcttgtttccgtgaaggtttcacctcatgtggtacttgtgcgtatgggttggcagttagtgggcagtacatgcctgatatttctgctggggctttgtctgctgtttcagataaaaaccatcttgaagcaacggcggatagacgaactgcgaaaaagctttgtaaacactatgatacatgaactgaaacgtcccgtccaggctctgaaaatgtgtatagcctttctcaatgacaagtctatgcgaacagatgagaaagcgatggatgaagtgattcacgattccatgtccgagctggataacttgtcggcctatctttcaaaactacgtgatatgacgcgtgccgatgatgaacacacgcagctttccgtccgtacatttgatataaagacgagtttggaaaagcttgtccggctttaccatgttcctgagggtaaggatgttgctattgaaacccatttcagttcggagactctggtaacggcagacccggtgcatgtttctaatattatcagtaatttgatagagaacgccgtaaagtattcgggcaagtctgtgcatattgttgtagattgccttttgcaggatcaccaattgacgatacgggtgtctgatgatggcatcggcattccggtttccgaacagaaccgtgtattcgataagttctatcggggcagtaatcttccagaccgttcattgcccggcattggtctggggttgagctatgtaaagttgctggtagaggcgcatcatgggagcatttctttaaatagtcaggcaggcaagggaacaatgattgaaattaatattccccaataagtccgtgctaacccgcataatccctactctaaaataaccaatgatatgaaagccttgaaaatactttttgccgatgatgatttgaaatattcaatgctgctgaagcgctttcttgagaaggaaggctatgaagtgacttatgccggaaacgggaaaattgctctggaacaatttccgctcataaagcctgatttggtattgctcgatatcaatatgcccggttacaatggctttgaagtggctgaacgcatccgcgagacggataaacacgtcctgatctttttcctttccgaccgtagcgataaggccgaccgcctgcaaggattccaactgaaggcgaacgattatcttgccaaacctttctatccggaagagctgacagcgcgtatccgcgagcgtttcacttcgcagttgtccggcgtggcggaggatgagatgtatgctttcggccattccgtattcaattacagtacgaacgagattcgtacgggaaatagtaaggtgctgattacttcccgtcaagccgatatccttcgcttgcttgcgctgaatgtgaataagactgtcagtcgcgatacgttgctggatgctgtgtggggcactgcctcgtatgccaactcccttgccttgaatgtacagatgtcctatctgcggcggtcgctaaaaaacgacccgagcgtgaggattgagtcgttgatgaaaaaagggtatatgcttgccgttctctgaaaacatctttatctttggattgttatacaaacaagacacttcaaaaaaagagagcttatgatgagtttaggaggatggatgaataaagtcctgataggttgggggatagacccgaagtttgccgatatgtttgacgagacgattattgcactgctgatggtggggctttcgatagggctggactatttgtgccaggcaatcttcgttggcggtatgaagcattatacccggcgctctccccatcaatggaatacgttgctgatgaaacgcagggtgatacaccatttgatacatattctgcccggaatcctcatttactacctgctgcccatggcctttgtgcgtggaaaggagatgcttgagttctcacaaaaggtgtgtgctgtctatatcattgtggcggtgctgcttactatcaatggcttgttgctggtgatgctcgatgtttataacatgaaggacaagcagaagaaccgtccgctgaaaggctttgtgcaggtattgcaagtgctactgttttttatcggaggtatcatagtggtttcagtgctgataggcaagtctcctatgaccttgtttgccggtctgggcgcatctgcggctgtactgatgctggtatttaaggacagcattctggggtttgtggccggcgtgcagctctctgccaacgacatgttgcggataggggactggatagcgctgccgggtggcgttgccaatggagttgtagaggagattacgctgaacacggtcaagatacgcaactgggacgaaaccatctcgaccgtaccgccgtataccctggtgaacaactccttccagaactggcgcggcatgcaggaaagtggcgggcgacgggtaaacaagaatatctttctggatatgactaccctgaagttctgcactccggaaatgctggataatatccgcaaggaagtccccttgatggccgactatcagccagcagaaggagaggtgccaaccaatgcacagctctatcgtatctacatcgaacgttatttgtgtagcttgccggtggtgaaccaggagatggacttgattatcagcctgaaggaacccacgacgtatggggtacccattcaggtatatttcttctctcgcaacaaggtatggaaagagtacgagcgcattcagtccgacatcttcgaccacttgctagtgatggtacagaagtttgacttgaaactgtatcagtattccgactaatatatcaaccggaactccgcatatacaggcaagtggtcgctgtatcctccttgatacttcatcccgtagtaggtgcggaagggttgctgccctccgtatttcttgtctcttgtcagtaggaagggcaggcagaatacgtctgtcttcgcttcctctgtatatagcggtgcgtgttcttgcagcaacgtacctgatacgatgatgtggtctagtaatccccattctccttgatacttgtagctgccgaagtgcttgcgtgttttggcttttcctgctagtagatggtaaagtttttgtggacgtagagagtcttgcaatgttgacggtgctgctgcctccaacacatcctttaccgatttattctccggataatcgttgaaatcccctaaaaggacaatttgcggatgtcggcgtatcgtgtataggctgtctatggcatgcttcacctttcgggcagccagtagccggtaaggttcagactctcttgcccctcccgaacgggatgggaagtgagctaccagtacatcaagcgtatcccggttcagcaacaatccgctgacgtgaagaatgtcccgtgtgggacggctattcttccggggcttgtctacggggaggctctgataggaaagcagtttgaaaagattacgttgatacaacagcgctacgtcgatgccgcgttcgtcgggagattgtgtcatcacataccggtagtctgcttcgcgcaaggcagagtagcgggtaaggtcgcgcatcacactgtcattctccacctcacacaaggcaacaagggcgggcggcgtccatcctccggtggcgatgatgacgcgggctatattatccagtttctttctgtatttagagtaattccaatgccgggtggcatccggcaggaactcgtagtcattctttagtgtgtcatgtcgggagtcgaataggttttctacattgtagcttactatccgaaacgtgagggtatctcttccttcttgcccgtacagactgatgtacgggcagagaaggaagagtataactcctatcttatggataacgttcatacaaacgattcccgttcccctttaaggaacgcgggatatttatttcaccggaatgtgcttcagtatatccagcagatggtcccagaacttctgtacggtaggaatcagcatccgttcgtcgggagagtgcacaccctgcagggtaggtccgaaggaaatcatgtccagtgccgggtatttgtcaaggaacagtccgcattccaaacctgcatggatagcttttaccttggcatctacaccgaacaaacgtttgtaggactcaacagccacttccaggatttctgaatgcgggttgggcttccagcccggatatccgtcgccgaacgatacggctgctccacccatttcgaatacagtacgcaccatattggcaatgtcttgtttggaggaggcggtagagctgcgctggctggtctcgatgcggatgatatggccgggtttcatctttacggaggccagattggtggaggtttccaccagccccggaatgtcttggctcatggcatacacaccgtgaggtgcggcatagatggtttgcagcaagcgcttggcggtatctttgtcaatggctttgggacgggctgcttccgattcgagtacgaattggaggtctgggtcaacgacggcatattctgcctccacttcggcggcaaagacattcaagtctgtgcgcagggcatgcttgtcggcatcgggtatggcaattaccgcgtgtgcttcgcgggcaatggcgttgcgcaggttaccaccgtctatttcgcaaaggtacatgtcgtacttctgggatgcctggctcaggaagcggttcaacagtttgttggcattgccgcgccccaggtgtatgtcgccgccggagtgtccacctttcagcccctttacctgcactttgcagcagaaataccctgtcggtacgtccacttcccggtaggtgaattcggcaacggaatctatacctcctgcacagccgatgaagagctcgccttcatcctcggaatcgaggttcaacagaatgtctccgttcatgaagccttctttcagggcgaaggcaccggtcagtccggtctcctcgtccacggtgaagaggcattcgataggaccgtgctcgatgctgtcgtcggcaaggatagccagttcggtggctacaccgatgccgttgtcggctcccaaggttgtacctttggctttcagccattcaccgtcaatttcggtttcgatagggtcggtcaggaagtcgtgcttcacgtcgttgttcttttcacataccatgtcgatgtgcgattgaagtacgacagtcttgcggttttccatacccggagtagcgggtttctttatcagaacgtttccggcttcgtccaccttcgtttccaacttatgtttttctccgaatgcttttaagtaagcaatgattttctcttccttcttcgaagggcgcggcacttggcagatttcctcaaaatagtgaaatacaccagccggtttcaagtcttttttttccataattatctgaattagcggctgccttacatgtgtttatgcagccttcattatcaattgtcaaatatcaattctccattaaattaaccacttattgctaaatatggttaaattgattgactattttattcccctttctctttttttagagtaaaaaaggcgagttagtccaaccaaagccctatatttgcacccacaaaaatagtaaaaacactattttcatgtaacaaaattaatggaaatgcttgatacaatattgataactctgttaatagttgctatttgcattgttttattgggtgtgaaggtcttttttgtgaaaggcgggagattccctaacgggcatgtcagtggcaataaggcaatgcgcgatagaggtatcggttgcgtgcagtcgcaggacagagaagcacaacgcaaatcccgtttttccattgatgaactggaaaaagccttaaacgatagtatgaactaattttaaaaaacaatatttatcaattatgaagagattaaactacctcatgaacggtctggcagctctcgcactgatcgttttatttgctcaatgtgccggcaatactgataaacagacaacaaacgctcctgcacaagccggcggattatcggaaatgaaaattgcttatgttgaaatagatacgcttttggcaaaatacaactattgcatagacttgaatgaggctatggtgaagaagggcgagaatgtccgtctgacattgaaccagaaagccagcgaactggagaagcagaagcaggaattccagacaaagtatcagaacaacgcttatctttctcaggagagagcacagcaggaatacaaccgcattgcaaagttggagcaggatttgcagaacctgagcaacaagctgcagtctgagctgatgagtgagaatgaaaagaacagcctgcaactgcgtgattctatcaatgctttcctgaaggagtacaataagacaaaaggttacagcatgattatcagcaatacgggttttgacaacctgctctatgcagacagtgtctacaacatcacccgtgagattctggatggtctgaatgcaagatactcttctccggtgaagaaataatatttatcctatgatataaaaaaggatgtgctgaaaaggagggcactgaaaaagtcccccatatagtagcgtcctaaaaaaatcggcacatattcaggcaaaagcttgagtatgtgccgatttttttgtaactttatggtagtaatcagacagatatgctaccactacaacagactatacagttcagtaattattcggatctatacgatttgattattcctcgtaacaacctattgcgtcagataaatgatttgatagacttttcttttattaaaaaagaactcgttgacaagtattgtcaagacaatggaaggatggccgaatgtcccatccggatgttcaaatatcttctgttgaaaacaatctatgacatatccgatgtcgatgttgtggaacgatcaagatatgatatgtctttcaaatactttcttgggatgagtccggaggaaacagatttgattaatccgagctcattatgcaagtttcgcaagttgcgtctaaaagataaagatctactggatttgctgattggcaagactgttggcatagctatagaaaagggcataataaagtctcgcacgattatagttgatgccacccataccggctcacgcagcaatccttggtcacccttggagagtctaagattgcgctcgaagcaattgcgcaaaagcatatatgatgccgacgagaccgaaaagagcaatctgccttcgaagaacacggatgacaacattgagcatgagcttgactatacaaaggcattgcttgatgtagttagctcaaatccctcattggcagagatacccaaggtcaaagagcggctgaatatgctcaaggaggtacttgccgatattgaagaccattatatgacatcaaaagatgaagatgcacgggtgggtcacaagagcgaggatgactcgtttttcggctacaagacacatattgccatgagcgatgagcgtataatcactgccgccacagtgacttcgggagagaagggtgatggcccacaacttgaagagctggtaaaccagagccgtgccaacggaatgacggtggaaacagtcgttggagacacagcttattcaggtaaagacaacatcatattatcgaacaatgaagagaatggttttgagctagttgcaagattaaatccagccataagcaatggattccgtaaggatgaggataaatttgatttcaataaagacgctggcatgtttgtttgcccggctggccatatggcaattaggcgcgctgtacaaggaaagaaaggacagggaacgaatcagtcaatggtctatttctttgatgtagataaatgcaagttatgttcaaggcgagagggatgctacaaagaaggcgcaaaatctaaaacatattctgttcaaataaaatcatcagagcatcagcagcatgaggcgtttgagaaatcggaagagttcaggagtaaagcaaaagtgagatataagatagaggccaagaactccgaattaaaaaatgtattagggtatgaccgagcatggtcatacggaatagaatgtatgcgtatgcaaggggctatggttatctttgtagcaaatatcaagagaatcctcaaactcagatgaggggagagccttttcgttctctaaaaagcccttaattggccgtttttaagctttacagggcaagtaaccgctaaattcttagattcaaaagtagaaaaataagttcgccaaatccaattatatggacttggcgaacctttcattttattgcctttagagagcctttttcagtgccctcgctgaaaagtacatcctttttttataggcctctctcccgacccctctctacgggggaggggctaggggagaggcttttaatgctccgattgtacgctttacccgctccgcagtagtgatggtgtgtgtgtattcatcaatatgcaccgttcctcccatagagacggcggaattatgatagagcatggaactttcgatattttccctggcggagaaatgaaactcgcggataccggtttctcgggcaatgtgggctatgttggtttcattcaccccacagcctgccaataggatgattcggtctgatgcttgttgttggagttctttcagaaggggaatgcctcgctctgctgtaggttgctgtccggaagttaggatgcggttgcatcctaattcgataatatcttctatcgcttttcgtggatttctgcatacatcgaaagcacggtggaaggtgacggacatcccttgtgaggcttccataagctgctccatcaatggaatgtctacatctccctctgccgtcaagcaaccgaacacgactccgtcagcgcctagacggcgggcattctctatgtctttcagcatgatgcgctgttcggtggaggaataaagaaaatctcctccgcggggacggacaatgatatgcaatttggtctgttgcaatgcttcccgtgcgatgaggatatcaccgtatgagggggttgtccccccctcggggatgcctacgcacagttccacccggtctgctccgccggcttgtgcggcaatacaactctctacggagttggcgcaaacttcaaactgataatctttcattttgtaaagtcatggttgtggtgcaaaaataagaaaagggtgaatacgaattcacccttttctgcatttattttcttttctgatgttactttgcgtagctcactgcacgtgtctcacggataacggtaatcttcacctgacccggataagtcatttcgtcctgaatcttcttggcgatttcaccggaaaggttctccgtctgcttgtcgtcaatcttgtctgcaccgacaatgacacgcagctcacggcctgcctggatggcatatgtctttgtcactcccggataggacattgccagttgctcaaggtcattcaagcgcttgatgtatgcttctacaatttcgcggcgtgctcccgggcgtgctcctgaaatggcatcgcatacttgtacgatgggggccagcaggctggtcatttccacttcgtcgtggtgggcaccgatggcgttgcagatgtctggcttttccttgaacttttccgccagtttcataccatagagtgcatgcggcaattccggttcctcatcaggcaccttacctatatcatgcagcagtccggcacgttttgctttcttcgggttgagtcccagttctgatgccatcacagcgcaaagattggctgtctcgcgtgcatgctgcaaaaggttctggccgtatgaagaacggtatttcatcttaccgataatgcggataagttccggatgcaggccgtggatgcccaggtcgatagtagtacgtttaccggtttcgatgatttcctcttctacctgcttgcgtactttggcaactacctcttcgatacgtgccgggtggatacgtccgtctgttaccaactggtgcaatgccagacgtgcaatctcacggcgaaccgggtcgaaagctgacaatacgatagcttccggagtatcgtctaccacaatttccacaccggtggcagcttccagggcgcggatgttgcggccttcgcgaccgatgatacgtcccttgatttcatctgattcgatgtggaatacggttactgagttttcaatggctgtttccgtagccacacgttggatgctctgtatcacgatgcgcttggcctctttgcttgccgtcagcttggcgtcgtccatgatgtcgttgatgtaggactgggcttgcgttttggcttcttccttcagggattccaccatgcgctctttggcttcttcggcagaaagtccggaaatggcttccagcttttctatttcctggcgctgcatgtgctccagttcttctttcttcttgtctacgatggacagttgggcttccagattttctttcacggcttctgcttccatcttcttgcgctggatttcttcctggcgctggttcagtaccaattcacgttgtttcagcttgttttctgcctgctgtatcttttggttacgttgggccacttctttttccaagtctgccttcttgttcaggaatttttcctttacttccagcaacttattcttcttaatcacttccgcttccgcttccgcatctctcaggataccgtcgtatttgtttttcagcccgtgcttgaagaacaagtacgaggcaaaccctccgacaatgaagcaggcaatggataatactattgtaactactgtcattttattaatttgtttttagtatataaataaaaaagcactgcataaaagcttgctttgatgaagggcaaacttttgtacagtgcgcgaatttctctcttttaccgacccgacggagggattgcagcttattgttccttgaaataggtctccaataccgctgtcagttcctttattttgctggtatagggttcagtatcattacggtccttcaactgaaggttttctaaagcgaactgataagccaccatggctataattctctctagagacacattcagataatgctcccgatacgcattgagcctgatatctacctgcttggcggcttctcttaccatttcctcgtcctcacggttgattgtgagagggtaggaggctcctgccatctgcaggtttatctttatcttatcgttcatacatcctcttctctttattcattcaacaaagcgatgcatttatcgacttcacgcactaatttggacaatcgcagtttcgtctctttcacgtcgctgccgttaaggctgattgtcgtagctgtttttaggttcgtgtagttaagttccagttcccggtattcagcttgtaccttcccgtattcctcctctttggcttcaagaagttgctttagctcagcattttcgcgttttaattcatcgtgcagatagattaaatgccgcagtctggcttcaaaggtacttaatagcttcttttcttcgtctgtcatcactacaccaaaattgtacacaaaaatacaatttacttggagattacaaaaacttttcggggaaaatatgctgtagaagtgccgaaataaccgaagtggcctatgaagtactggttttgagggattgaaaaagggtggtggaggctggcttttcaagagatgtggataggtatggaacaatttgctttttagaaggattttatttcttgcttttcgaaagcttagtatctccgttactaaatagtaatcgtccgacgcttgtttaattatcgtccaacaactgtcggacgataattaaacagatgttgggcgataattgaacggttgttggacgattactgtttagtaaggccgaaattactttttgctgttttaggcactactctttaggtgcggttggaatagtatgtagtaaaggaaggaggagatgctaagaaataaataaaataatttatataataatttggtttataaaataaaccttctatctttgtatcggagttcgaacccgaaatgtgattttggtatgtataacttaaggagaatgattatgaaaacgattgtttgtagaagtatggcggcagctcttctttgtgtatttgcattgggggtgtctgcgcaagatgttctgaaagtgaaggtgatgaacataccttctgctgtgggaaagataatgattgccactgacaaggggcagtatggtatggtagatgccaagggcacggaggcggtactggaactgaaagatgtgacagtgggtaaatataagctttatgtctatcatgatgaaaacaacaattatcagttggatagggaagacggaattccatctgagtattgcgcgatagcggatgtggaggtgagcgccgacacgaagcaggtggagatagcacttaagcgggtattaaaaggaagcaacaaataaggcggcaggaaaatggaagaaagaaaattgaatgagaaagagagtttagaactcatcactcggatgatacagaacacgaaggacagaatggcggaaaattcagggacaccttttttgctgtggggatatgtaacggtaattatctcgttgctggtttggtttctattgaaggaaacgggcaataacaattggcaattcctatggttcctgcttccagtcatagcctttcctgctacgttgtggagtcagcggaaggctcggaaaatgttgaagacctacatagaccgtgttgtggattatgtgtggacggtatttggactgggtgctttcttggtatcgtgtaccgccatatttgtatggaagattcctattctgtttgtcattttgctgatgatggggatgggaactgccctgacgggactgattgtgaacacgaaagtggttacgatagggggagtgctgggagccttgctctcgttgggatgtttctatatgcccggcatagaccagatactgttttttgcattggcgttcgtctttatgatggtgattcccggacattacatgaacagtgtggcgaagcgtcacaaacaataaaagaagaggatgatatatgtttaaagaactgaaccctttgctccatagcgaactgcggcttgcggtgatgtcgttgcttattagtgtcgaggaggcggactttgtctatatccgccagcagaccaaagctacggcaggaaacctgagcgtgcagatagacaaactcagcaaggcgggatatgtggaggtgacaaagacttttaaaggaaagatgccttgtacgatttgtaagatcactccgcaaggagtagacgcatttgaggaatatgtagagtcattgaaatcttatctggcagggaggttgtgagtgtgggtgactttacatttatggggcaaagatggaaatcttctgaaaaaggtttctatctttgcctttttcatgagaaggaggagggtgtgtcatcaaccgttttgccaccctcatgccggacaaaatttaaacagactctaaaaagatagaatgatatgagaattttagtcacttatgccgtacaaggcgaatttactgaattgaaatttcccggactgataagggaggaagaggtgcagataggctatctccgtaccggtgtgggaaaggtgaaatcggctttttatctttctgaagcgataagccatgcgcaaccggacttggtggtcaatgtaggtacggcagggactatccgtcatcgggtaggagatattttcgtatgccgtcattttgtggaccgtgatatgcagaagctggtggagcttggtatggagtatgagattgattcaatggatttgttgtcccaaaaaggttattgtttacactggccagccggtggtgtatgcaatacgggggatactttcttgacagaactctcggatgtgtccggtgatgttgtggatatggaagcctatgcccaggctttggtatgccgtgccaagaatgttcctttcatttcggtgaagtacgtgacggatattatcggacagaactccgtgaaacattggtgccgatgctcggaaggggttgggagaattcttcgagaagttaggaggagtttagcacatcatttcaacgtcttgaatgacagtatatgccaagtcacccccacagcgacaaggaacaatactatctttatttctgttagtggaatcaggaagaagatgcagtaaaccattgttccccacatcagcagtagagagatgattttagcacgtagagggatggctttgttctcgcggaagctgcggatatagggaccgaggcatttgtggttcagcagccattggtacagtctgggtgagcctctgaagtagagtgctgccgtgagcagcaggaaaggcgtggtgggcagcaacggcaggaagatgccgatgatgccgagtgccaaagaaactgttcccaaaatgatgcagacggttttcatgcggcaaatgtaggaaaaataataatatagataatatgtatgcgaataaagtaaagaaggttgttgccgtccacgacttgtcgggagtcggacgggtgtctctgacggtggtcattcccattctttcgtctatgggtttccaggtgtgtccgttgcctacagccgtattgtcgagccatacccagtatccggagttctcttttctggacctgacggatgaaatgccgaagattatttccgagtggaagaagctggaagtacagtttgatgccttttataccggctatctgggttctccgcggcagatacatattgtttctgactttattgatgacttccgccgcccggacggtctggttgtggtagacccggtgttgggcgataacggacggctttatgcgaacttccacgagtccatgattgatgaaatgaaacatctcatcaccaaggccgatgttgttactcccaatttgacggagctgttctatctgctgggtattccttataaggagatgaatacggatgaggaattgaagtcataccttcgtcggctttccgattgtggtcccgaagtggtgattattaccagtgtgcccgtacgggatgataagcataagacgtccgtgtatgcctataaccggaacggtaaccgctactggaaggttacgtgtccttacctgccggcccattatcccggaacgggggatacgtttaccagtgtcatcaccggagcactgttgcaaggcgacagcttgcccattgccctggaccgtgccacgcagttcattctgcaaggtatccgtgctactttcggatacgagtacgacaaccgtgaaggtatacagcttgaaaaggtattgcataatctcgacatgccgattcaaatctgcagctatgaattaatttaaaccaatctcatcttatgaaaaagaaaatattcctggcagtgtttctctgttgcggcatgtttgcagcaatggcgcagactgctgccgactctcttgccatcgtttctgccgactggcagactgagcccctgcagaaagggatgctttataaaaaggcagtattcagttctttgtatggagttcctcaggaagtgtctatttttgaaatatccccgaagcgctaccgtttcgatgtgctcgtccacaatcccaaagaggagaccagtgtagccgcccggcatgcaggtgcggtggcggccatcaatggttcctattttgacatgaaagtcgggaattccgtctgctatctgcgtaaggacggggtggtgatagatactacctctaccggggttctggcaacagtgtccaatggagctgtactcataaagaaaggcaggctggaactgattccctggagcaagcaggatgaaaaggcatgtactttgaaaaaaggcactgtgctggcttccggtcctttgatgctgaaggacgggcaagtgtgcgacttgtccgggactaaccggaattttgtagataccaagcatccccgcagtgctgtggcgctgacaagagaaggaaaaatcctgcttattgtcgttgacggacgtcggaagggaaaagcggaaggtatcaatatacccgagcttgcccatatgattcgtatattgggcggggaggatgcgttgaatctggacggcggtggttcttctacgctgtggagtggggcgttgccggataaaggaatagccaataccccgagtggcagtgcagagcgtaaggttgccaattctctttgtgtgtacgaataagttagggaagtaaatggataaatcttaagttttttgtaattttgccgtcgcatcgaggtgacattagatgcggcaacttattatattaattagcgtattaacaatatgtacacagtcatcaaacgcatggaagtgtcggctgcccatagcctgaaactttcttatcgcagcaagtgtgagaatctgcacggtcacaactggattatcactgtctattgccgttccaaagagctgaatgcggacggaatggtggtagacttcagtcacatcaagcaggtggtaaaggaacagctggaccaccataatcttaatgaagtgctgtccttcaatcccacagccgagaacatagcccgttggatatgcgaccagatacccacttgcttcaaggtagaggtgcaggagtcggaatcaaacattgccgtctatgaggaagattaatgagatattctacagtttgcagggagaaggataccatacgggtaccgcggctgtctttatccgtttttccggttgcaacctgaagtgctccttctgtgatacgcagcatgaggacggcatactgatgtccgatgaagatatcgtaacagaagtcagtaaataccctgccgctaccgtgatattgaccggtggagaaccctccctttggattgaccgtgaatttgtggattgtctgcaccaggcgggaaagtatgtctgcattgaaacaaacggtacccgtccgctgccggataatatagattgggtgacctgttctcccaagcagggggcaaagctggaaattacgcgtatgaatgaagtgaaggtagtgtatgaagggcaggatattactgtttatgagcagctgcccgccgggcatttctttcttcagccttgctcttgcagcaatacggccgaaacggtggattgcgtgatgaagcatcctaagtggaggcttagtttgcagacacataagctgatagatatccggtaggcatttataaaacgaataatggctgtaagcaatacttacagccattattcgttcatgcacgggaggagaggctcgaagtacaacgacgtacctttaatattctgtttatcttgattgtcaacatgctacgagttcgtaccagagttgttaattaattgaggtgtccgaaatttgtccgattaatagattcattccggtgtatgctcattggcatccataatatgcccatttcgtaaatttacataacggtactttctaaggtcatattccattgagctgttcgtcagaagttcacagaaacactgttctacagtcaaattttcaaatccttttgattgtctaaggtcatccaaatctatcagataaacatgctcatcagtgagattttcttcaaattcattatccaattgtttccaatagaactcagattcgccatctcccaaactaattaacagattgctcaatttaccatattctccctcggcgcaagtgacaacctgcccgtgcaattcatgcccctctatattggtgattacttccattacggcaactaccttcttaaaaaggaaattgtgtgtccgtatgccatatgctgtatccagacctgaatctttcaatatccaaagattagtaggcgcataacttgtggctatatggaacggtataggccctgatacttttattccatattttttgttttcaatttcttccatgaaaagcttcatagcaaataatattttaaaggttatttattcattaatatctgaatcgttctttctttctcggttatcactctttctttttcttccaaaagggcattgagatgttctatctctttctggcattcactcaaagttatatctcctgataccttgttaccattacctttgacttgatgaccgatacttatccctaaagaattagtttctctatcaaaaaaataatctataggtacattaaaataatctgctatgatttccagattatcggcaccaggaattgaagtgttgttaagccaaacatataaatttgatttagatatacttgtgtcttttataaactgtgcttgacttatattcctatcttcaaataatcttcttattttgtcaggattaaacatattatattatttgtattggatttaaataataatactcgaataaaataataagcttaatattttgatattaaattattattttagtcctttgcgttataaatataataataacaatcgtaatatttaagattatggaagagaaaaagcaaaaaatggtacctaagtaccattacgaccagatggaaaaagccacgagactgaagctccgtgatgagttcctaagaagaagcggtatgtcattgattacattctacgacaagttaagaaaagactccttcaaacctttggaaagagaactatatgagaacattttcataattcaacaaaattaaaatccaaacaaatgatttctgcaaatgagaagatgatggaaacgatgcccccagagttcaaacgtataatgtctcaagtagaggcggcggtacgcagcggaaaaacaagatacctcgtaagtagcagacgtttaaaacctgaatatgaaagagcgttgttagatgctgggtatgaaattagaaaaggacgtgtagcaactcaaattacatggtagcatttatctccaatattgaattctacaacacccctgaaggtgaggtgatgatgaaggagttcgggcggccggcggttgtacttaaggattccgataggccgaccattgaatatatgctttccgttatccgggatcgatacccgaaagcgcatgcccggctgatgcagctctattctgccagcaccatgaaccggtggcattatgaattccgggtagttcatcgtttcatccgatgcaatttcggagagtatgaccagtacaatcttgacattaacaaggatggacagtttgtattcgaggaggtcaaatgcccgttacggggtgaatgtgaacatgaaggggtgatatgcagaccggagcttgatacagcactgaccgatcgcgagatggatgtattccggctcattgcctccaactgccaaactgatgaaattgcggcagagctacatatctcgccttgtacggttaaccgccatcgagagaatatcaaggcaaaaatcaaggttcgtaatgtgggtgagatgatttcttactggcaccggaatcaaatgaaataagctcaccgtgaggtgtgccatctgtgtttaatgtgtattctatggctgtggcggtctgcgaagatagtccggcccctcatactatattcaaatggtagcggtatacttaagatttgccgcgactggggttcgattcccctatatgagacgatgatttactaacttaataaacagaatatatgaataataacaaaggtttttcctccatttccactcctgacggacagttcaggatatggattccacgtccgacggcttcgggcagagtaatatgcaactgtggctttgcactcaagagccatcttcctttcgtcgatgccgttgatgcgctggactacctgcaggtagacgaagttcggcagatagaccaggaccttagtatccttgttatttcatttctcgatgcaccgcatgagtgcatgctgaagatgatagaagatatccccgaacttatggagcaatacttggtaaatacataagatctgaatgctatgagatactttatagacaacatcaagacttatgccagtgtcaacaaaaaaggcagggcattacagatatacgtgcaacagtttgaccgacatctgattgctgacgaatgttctttggatgcactgaagtgtgacatcgagcaccagattaaggttatgaatgagaaatatccacgcagccgtccggttcggctcgaggtatatgagaatgccaagggtggacagtggactattcttgtggagcatgacagtgacagtattgtctgtatcatatcctatgaaaaggtgatgggctattataccttggcagataagatagatgaatttgcaaaaataggacagtgatgagtaatgtgattgtttttttatggacatctctgattgcattggtggccgccttgatactatgtgtctgggcaatgcggaaagcatccggaccttaccgaattctctttctctttgatattatcatcttgatgataaatattggaataataggatttgcaattgggtgtctatctaatatacggtaatatgagagacatgaaaatgacagatttcccgacatatccttgggagacccttgaccatgtatcaggacaacagttactgttacaatatccgtcctggccaacatgtcgttggagatttattcgacgattccaagacgaagctggtatcatacaacagaaaatcacatgtgcagataatctgtgtatgcgccccctacaagccgcctttctatgcgcgtgaatgtatgtatggtatatattcggcgtggaaagaaatcgaagaggacatctttaacttggaactggcgggatattctaccaagcaaaaatttccatccctatgtacatcacaccattatttttaaagtatgaatgagaatgaattaaccaaaggtgtttgccgtatttgtggttgtaccgatgacgatccttgctttaatccacgagtaggcaattgttggtggatagatgaaacccacaccttgtgtagccattgcgctgatgaagaattaagctgtgaccctgaaacacggcactgcattaatagcacttttgaatcagatgaactaataaaaaatgaagatttatggtaacgaaaacaacattcaaaaagaaatttccggacgttaaggtgcagaagctacagaccagcgttgtctttagcaggcagcaggtggaagaaaccgtattgaagatgtgcgattctctcggtgtcggactgctttattacaattattccaacagatggataaccgtttatacctccgaaaaaatgaaaaaggcactggactcaatgaaaccggggtcagaggtctttcacgaacattatggtgtctatggtaaagtgataagcgataagccatttgtcatttgtggagaattgtgtatcagggttgatttcgggggaatgcctgaaggtggagcatatggttgtacatgttttgtaatgtaatcgaataaatatgaatatagagaaaatcatcttcaatctcctaagcgcacataggtgggttaggtattggatacaaaaagagattgtaggcttgacaatgcctggtgaatacgttgagataaggagttctttcttatcagatacagatcttgctgatattttagaagctggattcaaaattaaaagcatctgctcaaaaaaaatagatgcagatgcttataatgatgttctgttgatgcgtgaactttaaatataaccaaaataaaaatgaatataagtaagaatattcaaggatacccagttaagtgcgctggggttagaaagaataagcgtataaattcagcgtgtataatgtgagacatatttgacataaagaaatattataccaaatcgacatggaggatttcaggcatcaatcaatgcataatgaacagaatgtgatgaatatttataaagtcaacgaatgggcggagttcagaaagaaatttcagagattactgccgaatatacctataatagacttacatgatgcactgttatcagctatcaataatagattggtaattgatataattgcgttagacaatagattgcagaatatgtatcctgaagaatgggagtgcatgtctatgaaggaaataattattaaacattatggtttggaagccatgcaattaatagaatcagtattatgatatacggatatttaagagtaagtacggacgagcaggactctagtaatcagaagttaggagtctgcaaaaaagcggaatccttgggggtgtcagttgatgattggattattgatgatggcatatctgggacgaaggagcctgaaaaacggttattgggcaaacttatgaagaaattgcaaaaaggggatgtgattattacatccgagctttcccgtcttggtagaaaattattcatgattatgcgaatattggagttctgtatgcttcatgaagttaaggtttatacagtaaaagacggatatgaacttggagataacatacaaagtaaggttcttgcttttgctttcggaattgctgctgaaatagaacgtgacatgattagccagcggactaaagaagcattagccagaaagagattggaaggcgtagtccttggtcgtcctaaaggcagaaagagttctcctgacaaatataaattgtatgggaaaaatgccttgataaaaggattgattgacgaaggcatatcacagcgtaaaatagcaaaaatatgtaaggttgatagaaatacgcttgcaagatttttgaaatatgaattaatcaattagagtataacaaattagtaatgaataaaaaagaaatatcaatgaaaaaaggtcagaaggtgcgcatcctgcgtaccaatcaagtagcgacaatcgtcgaagtggagttaattcgtaaaggtggcaaagtacatcggtactgccatctgaaggtaggtaacaagcaggacttgtggttggatgcctcagaacttggcagcgtggtggaggaagtgaaggtctcggtagttgatgaccggaaccgggaactgcatttgtttatatgccatgactactccaaggataatatgaaggtacagcttaccggtaagaatccggataatctgaaggaagcttccggactatatgcgaaactgatgagcttgttcattgggagcctgaagaaaacgcgggaactgtaggagcggataacgtccttgataactgtcttataaaacaattcttttgtaccaaattaaatcatccgcaatatgattaaagctgccgatatttataatgctacccatgatgggttagacattattttgtactattaccctcaggcagaggggtgcatagacaataagaaaaaattcaagcgtcgtcccgatgaggatgacgcctctgcctgcctcaagaaatatgatgactgctacaaggtcactgatttcggggattctggcacggccatgagtcctattgacatctgcatgaacgaggagaatgtccgtttcccggaagcggttgccttgcttgcttccaggtataacgtgaccgatgaactcaaacgttctgtcaataaaccggatattcgcaaacgtccggctacggctgatgaagccgaaggtgccaggttcttcgagcttgaagagaagtttaccgatgcacagttgcaggtgctcggtcctcgggtcaggcaggagcacgtcgatgcgcttcactggtatgtggccaaatccatatcctatgtccgcaaccgtgaagtcaccactaaatatactacgcctacttatcctatcttcatgcgtgagtgtgctgttacgaagaaagacggcagcactgacaagttctataaggtatatgagcctctgaatccggataagcagtggcgcttcagctatacgcccgatggggtgaaacccaaacagtatatcaacggttttgccgagctgcagaaggcttaccgggatttcaatgcccaggaagagaaactgtttttcaatgatccgaagaataaggatgcccaatacaaggaacagaagctgaaggaggcctttatctgttccggagagcgtgacgccctttgcgtccgtgccctcggttgtcatccgctatggttcaacagcgagacctacaaggtcgctcctgaagagattaaggaaatctataaatatgtggagcgtatctacaatattccggacatcgacgacacgggcgtacgcaaaggaacggaactggccctgcgtttcctcgacatatatacgatatggcttcccggatggttgcggggctatcgcgaccaacggggcaaaccacgcaaggattttcgtgactttgtggatttgcgcccgaagcaagaggatttccgcaacttgcagacattggccatgcctgcccggttctgggtggatagctggagtgagcggagccggaaaacaatttatgaagtaaactccgcttacttgcattatttcctcacgttgaatggattctatacactgaaggatgacaactcaaaggatgcgaggtatatacaccgtaacggttgtatagtcagtgaaatcaaggcaaaggatattgtggcgtttctcaagcggtttaccattgagcgttatcttccggtagatattcgtaacctgattctgaactctccacgtaccggagaatcatccttggcgcagcttgatgaaatcaacctggacttccggagctatacccccaaggagcagtatatgtttttcagaggtgagacctgggaagtgagtaaagacggcatcaagtcactacatgggcagatacctgacaaccgcagcgcctgggagtcgaatgtgatacctcataaggtgagcattcttccacccatgttcgaatggtcgcacagaaaggacccggaggatagggatgtgtttgatgtcaccgtcaaggagcataagagctgtttcttcaattatctgataaataccagccgtctgtattggcgcaatgaattggagtatgcctggaaggacaaaggggtagacgaagctgacaagtaccggacagagcataagtttgacattgccgggccgctactttcccgggatgagatacgagagcagaagcagaacctgctcaataagatgtttgctatcggttataatatgcaccgctacaagtcgccttcacgcgcgtgggcactttatgcgatggataacaagataggtgaggatgatgagtgcaacgggcgtagcggcaagagctttctgttcaagacattccggttcttcatgcggacggtcaatctctccggacgtaatccccgccttcttgataatccccacgtgtttgaccaggtagatgtacatactgattttgttttggtggatgactgtgaccgttatctgccgatgagccagttctatgacaatatcacttccggtatgacagtcaaccccaagaacaacaaatcattctttatagaatttgaagaatcccccaagtttggttttaccaccaactatgtgccgcgtgaatttgacccttctacctcggcacgtatgctgtacatggtattttcggactattaccatcagaagaccgaagaaaacgactacctcgagagccggaccattcgtgatgactttgaccgcaacctgatgacgaataccgattacagcgaggaggattggaactgggacttgaatttcttcgcccagtgtcttcagttctatctggctatggtggaccgtaatgtcaagatacagcctccgatggataatattctcaagcgcaagcggaaggctgacatggggtccgacttcgaggattgggcttactgctatttttccgaggatggtgagaatttgaacacgcctcttgtacgggaacaagtctatgatgattttattgtcgcatccaagtcgaaaaaggatttttggaagatgcagcgcttcactaaagctttgcgcagcttttccgaactatgcccgtatattgccgagatgaatcccgcagacttgttgaacaagtcggggcggtatcttcagaaggtggacggcaagaccaaggagatgatttatatgcgttcaagacagacgaatggagaaccggcggcattcgttcctcaagtagaaagtggtgatggaaacgctccgttctgattacattaagcattatgaccggttcctgccggagatgctgcaaacggagcaggcggctgcctatattcgtcaggtctatgactatctggagctgatgaagccgggcaccattctgaacctgcaggcagacaaggagaagctcccttggatgcttgtggccgtcggtgcatttcttcctgcacaagaccattggatggactttgagttaaatgatgactatactaagctgcgaaggaaactgctgccgccaaatttccgcaaggctatgaaactctaacatccggtataagagtcacacagtgaagccgcgggcacgattgtccgcggcttttactattcaatagggcgccgggcatgcccttttccttgggtttcccactcccttcccctatttgctacaaaattattgtaactctgtaacctatgtttgaaaaagaagataaatcatttataaacaataagtaacaaaggttacatcttaggtaacaaacattggttacaaaaaataagggtttgttactttagttgtatgagtggaatatcggagtcaatgtcacaaatttgattattggtaacaaatgggtattgtgagcttcgttacaattcttttatttgataatcagtgaaatacactcggaaagttacacgttacaaagttgcataattttctaagcaaaatactcagaacactgtatggagcagaagatataagagcgtgtggagttggcaaatgtaattatattttatgttttgactgttttggcgctgattttggataaagtgtctgtatttatgcgtatatttgtctgcatataaatgatttaccctatgagacctaatgtgataatagagttgaagccttatctccatgactatttgtatcatgaattcgggtgcaggcctgctgatgaaggtgtgaatgtgactgctgccaatgatattggcaagttcattcaggccatggtcactgttacggacagaccgcccaagcaggctatcaaggagcatccgataacgttgtatcttcctatccaggagtggaaccattttattctgcaggagaacttcatctatataccggaatggaaacagcgtatgctccagagctatatcgaagcctctttccgcatacgtgttcgggaatactttgttgctggctatgagaaggggtataagcaggaccggattatccgggcgttcctgatggcatacaatatcaagaacaatgccatcaattacgatgctgtcaagaagttcgactaccgtaataggcagcggatggtcaaggaggtgaatagggatattcaattgtcgctgttcccttgacattttttagcagattaattattaagtaaaaagcagattttcagataaataactcttaaaatataagtgagaaatgaatatcggtgacaaacgtgcccaaatatgtgccatgggatttattccggttgcggcctcggtggtcagaaatatgccgggtgtggaaacgattcaggtttcaggagaatggacgccgattccggtctcttccggggagttcaaggaaaagaacgttaccggggaattgacggagcaggagctgaaagcggtggttactgatacgggagccttattttccaattcgctgcgtgatttgctttgccgggagggactggtccgcttgaaattcaccaatggttccgaaagggtggtgggaaccgaccagttcccggtagtggtgacgcttcaggaatctggttctccggcagcctttaccctctctttcaagcgcagcagccctgagccggccaaaatattgaagtccttttaagcggttggtgccatcgtacctttgtatcggattaataaggtacaaaagataatggcattttcaaacttatatagtgcagtctgccgaggcaaatggttcgtttccttccgcgaggtggaatctaacttgttgcttgtaaacagactgttggagcatggcatagacaaccaggataacaggatacttgccgacagagaaccggtgccgttgatgattgcggcagcgggcggtcgaacggcaagactttccggtggttatgctgacgctcccaaaggcagtacggctattattcccgttcatggtaccctgcttaaatacggtacctattgcagctatggtacaatggagtatgccgacctcatccgcgaggcggcagattccccgaatatttcttctgttttatgtgatatcgattccggtggcggtgcagtggatgccattgcaccgctggtcgatgccattctgtatgcgcgtggcaaaggcaaggcagtggtggctcattgtgacctctgcgcttctgccgcttattatgccgcttcctattgtaacgaaatcattgcggccaatgaggtgtctgccgagttcggcagtataggtgtgatgatgagttttccggattatgccaagtattatgagagtgcaggcatcaaggtgcataccatctattccaacctctctgattacaagaacgctcctttcgaggcagccaagaagggggattatgcttccatccgtgacgaggaactggacccgttggcccgcgacttccaggagaacgtcaagaagaatcggggaaattgcctgaagctggagactgaaggattgcttcgtggccggatgttctatcatagggaggcgttggaagtggggctgatagacgctatcggtacccaggactatgccgtacaacgtagccgtgagattgattctgaaatgactattaacaattatatcaactctaaatcatagaattatgtttgcaaaagtgatgagcgtagtgcttggtttcttgggcatctctgcgtttgctaaggatgagaggggcaaatctatcctgctctcctctcaggaagaggaactgaagaacaagtacggtgccgtattcgttgaagccttcaagaaggacctcgccgaatttgagagagatggcagaaatgctgagagtgctgtgaccgatgaggtgagaacgcagttagagggggagcgcgacaagaatgcgcaggaacttgccgaagctcgtgaggctttgacagaactgaaagccaaagtagaagcgcaggagaaggacatcgcctcgaaggatgcccagattgccaagatggccaaagaacctgcaccggatgcggggcagcaggttgcaggagacaagaacgaaatgggtagtaaattcaagccggacatgagcctggcacacaaccgttatttggatgccgcgttcaagggagcggcatatagtggcaactcgaccattgagactaccgagcttcagaaagagttcggtaagtatgtttcttccgagagactggaaattctcaaagggctgatgggtaccacggagtctaccaagtacatgtcaaccttagtgactgacaagacagaggttcgtgcgcagcaggctgccgttgattcagttctccagcagttcgtaccgaagtggactcccaagggcaaatcgaagttcactccgttgaccattaagaactacaagtgcaagataaatgttcccatcactccatcggacatcatggaggatattctcggttatctgtatgatgagaacctgaagcctgaagatatgccggtagtcaagtatatcttgtatcagctcatcttcccgaaactggacgaagagcgtgaaatcgccttggcagttggtgagttcaaagagaccagcgcaaccaaggatggtgatgctgccaccgatgccaatgatgtgatggacggttatgttacccagctgaagaagctgaaaaaggctaataatgataagattacttggttgcttgatggcgagaagctggaagatgcgaccttgcttgcccagattgacaaggcggtgagtgaggtgaagccgttgtatcggaaaaagaccatgtttatccatgccgatccggacctggtgatacgctacagcaaggcataccgtgaaaaatatccctggctcaagaatgaggacggtgagaaaatcaaggtggatttctccaggttcacgttcgcaccgcttgagggcatgcgcggtaccggagccttcttcattacgccgaaggagaacttcaagcatttgcgcagccgtgacccgcagagcgccaaggtttggatgcagggtgagaactacgatgtgaagatattcgcggaatggtgggaggctgtcggtttctggctggcagaagctatcttcgcttatctgccgcctgaagaaacagacagtttgtctgaggcatcgtccagttcttcttccagttccggtgcaggtgtttaaccatttaatataggagacatagatatgagtgatacatatgcaatggtatcggtgccgaagaaggcgtcgaatgccggacgtccgaaaggaaagaaatcctacatcgtgatttttcgttgggaagacgtcaagacctatgagcgcgatgagaaaggagtaaaagtgaaggcattcgagatgatgtcaggaaaaaagcccatagcggtgtatgctacggactctaccatcaacatctaccactccagcgagggagaggatgatgcacgtgggttcatccaccatgtagattatgaacatccgggtacagaactggagcatgatgaattcgtgaacaacaatatcaatgagaatctgggggcaatcgtgttcggttgctccggtgaggatgcgaagattgccggtacgccgtgcactccgctgaagatgactaaggccgattctcaggatagcaaggagggtgacaagaatactatcaatttggcaagttctctgcgcggaggtactatagggcatattgacaaaaaactcataccggctacggatagtgaagaaatcaatgccattttgggattgggaactggctcttccggcggcttgggagtttgattcatttctgttttaaaggttggttatgggagagaggcgtttgcaatgcattcgcctctctttgtgtccttttacgaactatgtagagacgatatttttgtatcgtattaaaaatgttataattatggcaacaaaaaagagaacagctaagactgaggatgtggctgtagaaccgaaaccggtagaagagagtgttgagcaaaaggatgtgcaggccgtcggtaaggcagtggatacggtggaggaaccggtacagtcgcggtcggttcaagaccatgtgacagtggttattccttattgcaaggagtttgcacaaggcaaggaactgctttttgcactgcgttcctggcagaagaatgtacgcttcggcatcaatgtggtggtaatcggtgaccgtgaagattggttcagcgaagagattaccttcattgagcacaatcgcgtctctgataatgcgcaggttgacacgctggccaagctgaaggtggctatggaattacccgaagtgaccggacgtttcatctggaccaacgatgacatctatgtgatgaatcctatcgacttggctcatgtggcgcttcccaaggtcaatggaatgctcgtcccgcttagattcagagggctttatgccgagaatatgaagcggacgaaggagctgctggagaagaatcaactgccttgtttgaattatggtacgcatacacctatgttgttggataagggaggtctggccgccatgttcgagcgattccccgaactggaagagggaggctatctctttacttccgtttattataattctcttccttatccgacacaacccgtatttctcaactggccgacagaccaggtgttgctgccggtggtttcacaaaagccggatgagaagagggtacttgacctcttatcccgcaaggtgtttatgaacaatgcggtatccggatattcaccatggttggaaaagtttctggaaggggtcttttctgaaccgtcggactttgaagggtgaaggacttttccggagacgtcttcgcggaaaagacccgagtctttccgtgaggagttcccgtttctcaatgcctccgactgtccgatggagttggaggcactcgcttcccgcaagttcagcaaataccatgcctatgtgcggttacatgccaggctgagggattgtacctccctgcaggagtgtgccgatgtcagccgccaggtgattgacagctacatggataaccgcatgatatggcaggagctgaactattacaaggagcatcacgctttattgggcaagcatccggcttttgcggagttccgtcgcagaagtgagttgcttcatcttccggtcaaagaactgctacgacggcagcggcaggtgatgaacaatatatggcgagttaggtctgagatagccaaaggcgataaaccgcatttggatgttgtccgtcgcgaacggttggcgggatatgagaaggaactggccgacattaacagattattggaatgagctattacttcaatcttgaagaattgcgtagggaaatgtctgatgcacgcctcttctcccgtcggtttgaaaccatgttgacattcaagctgaacagtttgaaagagttgtgtgggcggcttccacgggagaatgaggcgtttttcattgagacaaagaaaagctttacggcattcactttcattgtttatctgattaagaatgccgggcaggtgaggcacttgtatatagcgacctattctaccaacgagcgtatcatcaacgcgttgctccgttggcgtgaaaaagggttgattggcagtattcatctgcatatatcggagaccatcaaatttcgtatgccgaagatatacgagaggttgatacaactccatcaggatggagagatagagctttcatttgcatggagccacaaaaagattacctgcctggacacatcggcaggtttctttgtggttgaaggctccggcaattatggcgagaatgcgatggaagaacaatacgtattccttaaaaataaagaagtatatgagtttcgtagcggacgaattggttaagtggcgtgacagcccggcatggtatgaccgtatcgacctggacgagttcgaacggctggcgggtataggctatgagccgcgacagattgccatgtattaccatgtaccggagaatgatttcctctggtacttcaatttggtaggctcaccgctgaaataccattatgagcgtgggcaactgcttcaacgagctaaagaggggctggccatggccgccagtgcggagaccggtgacaatgtgacccaggcacagcggttcgacaagtttcgtcaggcgaccggataccgcaattccattaacaaaatattttatgacgatataggctgatgttcgataaatcttactttgatacccttcaggattacatagcctccggctgtaccatgcagttgactgccgaagaactggactactacaatgtgctatatgcactggtaggcattaaccgcaagtacggtaaggataatgccgtcgccttcttgatgcacgaaccgttcaatgtggaacggatgcgtgcccggcagatgtatagtgaggcaatcaatctgttctacctttgtgataccattgagaatgatgcgcaccgcaacatgatgtatgacaacctgatgaaagcggcccaggtggtacttcagaacgccaccagcgccaaggatatggaggtgtacggtaatctcacggtgcaagcggcaagaatcaagcaattggataaacccgacccgataaaaccgaaggagatggatgagaaaccgatcaaggtctatgacctcgacccgaatgcggtgggattgccttctgcaaaccgcaacctgctcgcggcgcagattgacggtatgcaggatattcctgcacgggagaagactcgtctaaagagagatgccaatataattgatgttgatatagaagagatgctcgatgaccaggaagaaaaaactaaagatttcggatgaggtggagctgcgctattcaaactggatggcgcagctcattgccgtgatgcagccctggtcgctttattgggttgccgggcgtgcatccgccaagacagtgcaggtattggcggaacgggtgcaagaagtggcgcaggactgccctggtgcaccgttcgcatgggtagccgatacgtattccgatttgcataagaatgtggttccctcgctggtggacggattgtcaaagctggggtgggagcagggcatccattatgttatgaaccaggaaccgccaaaagagtggcgcgaccgcatgtacaacgtatgttctgattggcgcaatacgatggtgttctacaccggcttcaacttcacctttatctctttggaccgtccggccatcggtgccggtcgttcctatgtgggggtgttcggtgatgaagtgaagtatttcccggaagagaagttcacgaacttgctgaaggccgtgcgtgggttccgggtcaagtatggtgatagcgtatggtaccgcagccgtacactgactactgacatgccgaatccgaaccatctgggtgaatatgactggattctcaagctggccaagcagaatgacaagcggaaaatccttctcatgctgcaggccgggtttgtctataacgagacgaaaaaagagtatgtggcggctatgcagcggtacaaggaactgaaagaagctttccggaaagaccgttcattgcaggccaagcttgatacagcagaacgttccatggaactcgccggcaagaacatgaagcgttgggaggagcgctggattaagacacgccggggcgtatctttctttttcatttcttcttcctatgtcaatgtggatatattgggagaagactggttcagcgatgaattcgctgaaggactggaaggtattctctgcaacatactttccatcatccccaagctggaggcaagccagatgttctactgcaacctttcgatgaagaacttctatgccgacggtttcctgaatgaagtgatagagcagcatccattcgggtgggaacaagactgtaccgtgctccggtacttggataggaacagaccgcttgaagctggcatggactccggcaatatgctttccatggtgttcggacaacgtagtgggcgcgtgatgcgtgtactcaaagaactatatactttgccgcccaactccgtgcgtgaactggccgataagttcctctattatttcaagccgcacaagcgcaagatactgaagctttattatgaccgttccatgaacaactacaagggggtaggtgcggatatggccacacagataaagaagaacatcgagacggatgcggagggtaggcgtacggggtggcaggtacagctgatgagcttggggcagggcaacatcggcagcaatttggagtaccggttcttcatggacttgctcagcggtaacctggagcgtacgttgtttatactgttgattgaccagcacaattgcccgaatctcaagtcggaaatggaggtgacagaaaccaaggtagctacccggccggacagctccagtgtgatagtcaaacagaagaccggagataagctgcctgcacatagattgcctaaagaatccaccaacctgactgatgccttgaagtatttcaccctgcgcaaagagattatccgcacctggaggatgggccgcaatgtgtccggcgccgcttcggtgtgacatttcttttctgtttgctttggctctgttgtccgtgaggatggcagggcctttcgtttatgggggaggccgaagcgggtgggattgggagcatcgggtacaaattgtaaaggttttgtcatatttccgaatcagaaagggcgcttgcgaccgcaaatcaccgacggcgcggctcgggcagcaagctggctcatccctacaacagaagttgtagggatgggttttctttttggttttcaaggaggtggatttttgattagggtgtttctgtaccccaaaacgccccattgggagaagaagtcaccccgatacggggtgggcgcgcgaaaaatcccgttatacaagtctggtttaggtgccggtggcggtatatcctatgtcaaacttgcataacgggatttttcgcgttttagcggtagaaagcggtgctttctgtctgtttttatgaaacgcccctccatctggaagggcagagcggtaagcgttccgcttggcgtgcctccgtttcttttccgcaactccttttcatttcctgcatctctgtatgcggtcaggtagtcttttgagtccgcaaatgtagggcaccggtctgacaagcaaggtcgggcattgtccgctaaaaaatctccagccctacgggtagtattcaagccttcggttttagtcggaaccttgcggaatgtcatcctcggcacctcaattattgcggcatcaaaaggcaaccataccgcacgtcatacagacacgccggaataaaaaaaaagtcgttccgggaaacggagaatctaaaaaaggctccacccgacaactccagaaatccagaataaattaaaaacttacagttatggcagcaaaaagaaacatccccgaagcatggaaaaatcaatggtctaaatttatgtttaacttctttgactacttgcctaccaaatacgaggctaacaaacgggagtggtctatccgcaggatgatatgggattttaaggacgggaagcgcagtgcgtctgtagcggaacttgtagcgaagaaaatgcgtgagcagtttggtgcagaagtttgcaacgtgacgttggtctgcataccagccagcagcggagagaagaacgaaatcagatacaaggcttttgccgaagaggtggcacggctgacgggatgcaggaatgcgtacaaagcaattaccattgagggaggacggcttgccgtccatgagatgaaagcagccaagacggtgcagacggtggaggtcatcaagtttgacaagcgttttttcaagggtaagaaatgcctcgtattcgatgatatactaacgcaggggcatagttacgcacggtttgcatgtgcgcttgaaacgcttggggcagaggttttgggaggctatttcttgggtaagacaattcttttataacaacttaatccatacaattatgaacactctttttgataacgattgtcgctacatgagcgacagcgaactgatttacgaaatcagcaacaacagacagattgtttcggacatcgaacgcggcaacgaagtgatagaccttgaaaaattgttttcctctttgactcctggacgcaggagggtagccgtggcagccgtggagatgtacaagagacaactgtcgcagcaggtggaacgcaggcagatacggatgagcaaagacatatacgaactgatggagccgttgataggagatttgccgaatgaggaattttgggtagtgtcaataaaccaagccggacggcttatcaagaaagtgcaggtatcagtaggcggcatagaccagacttcagcggatataaggctgattatgcgagtgctgattgatacgggggctacgcaatttgcagcggtgcataaccatccgagtggcaacagtcgaccgagcaacgaggacaagaggctgacagagcagcttaacaaggcggcagggttattcaatatcaggatgatggaccacgtgattataacgaatggtggatattacagcttttgcgatgaggggctgatttgacggatgggtgcagggtgcacccattccgtttgctcgcacgctcgcaaacggaatgggacccgaaaagcggaatgactgaattgtgttgccgttccttcaatcacggagggggtatgtgcgaaaacggttgctttttgcacatgaaacggatttcgcgtgcagaatgtgggtgattttgcacgtttgctttgttttttcaaaatattatcccgatgtttgtagtgcccaattttaatatagcctgaattcaaacagacaatgcaacagtgtcgaattcattgttagttaataatttatatttttcctttggggtcatgtaacccaatctttttctcggtcttgagtttaagatgttttgaacgcgcattacctgttcattggttatgtccctaaagtccgtacccttcgggaagtattgcctaatcaaaccattgctgttttcattggctcctctttcccacgagtggtatggttttgcaaagtaaacaaaaatatttagtttacgtgcaatttcttcgtgaaaactaaattcttttccattatctgccgttattgtatgtatttggtctctaaaaggttccaaggcatcgatggcagctttagttagcgggctggcatctttcccgctaagtagtcttatccatactagtccagttaccctgtcgtttatagttaatagtgctcctttgtgattcattccaatgactgtgtcaatttccaaatcaccaaaacgtactttcttgtctactatcgtaggacgcttgtctatgtccacgcggtttttgataaaaccacgtccattagtcaatgcacctctcttcttatgacttcttccccgtcttcttaaatgcttgtataacaacttatctccatgctttttatcttcccaaatatactggtagattgtctcatgagaaactgtttccaagccctttgttcgcataaacccagtcacttgttctggactgaaatctttctttatgagtatatctacttgaattttcaagtcgtccgtaaacttcacgaagtgctttcgtgaacgcattctggacatatacttagcctgagcgagatccggtttgtaaatgccattacgtttatcactattacgacgtaattcacgacttatagtgctacgatgaactcctacaagattggcaatctcggttcttgactttccgctttgcagataagcggaaatgttatacctttgttcttcggttagctgtttcatattgcaactgaatgttggggaactggaagatgcaaagaaacaacttttccacaggggaacaaaagggaaagaaatcttctttctctgttcctctgaaaaattattcttttcgtatcttctcattgtcatcattctcactcctgttgcattatccgcttgaacttaggtagaaaatgaatcccttttcatcgtgtaatccgtaaagccggattaaggtttcactattacctttgggcatgcgatgataagggattcgccatatatcagaatcgatatggcaaataacaaggtaagcatatatctgacactaagacgttttaggagaagaataaaaagccaaaataagagaaataagaggaaaaaacagagaagttttacattagagaataacagaaaatatagagaaattgcaaaactaattcattcttatgaagatgctttgctctattttatgcctcggaatctgtcatatcttactcaaaatgaaaagagtcctttctatgtaaagaacttagagaaagaaaaatttaaaaaagtacggaactttgatgtgccgagttgtttttctattattaaaaatgaaaaagaaagctatctttttctgaaacaaataatatcggcatttgtttatcaaacatgcgatgaattatggattgattatagaagttgccaggagacagatttggtaacacaaatctttttggatgccatcttattggagatagattgttttatagaaaactgtaaaaaagcaaatatatacaacaaatatgtgcggcttgcttccattggcggtaagaatatgaacaacaattcggtaagaagattactcaattccgtaggttctcctgcggtattgcttaacagacaaattctttatagagatattattccatataggttaaaacgttttgatggaaagaatttgaatcattcaagtcttttagctcaaaaagaaatagacactactacattgcttgactatgtaaatcgctgtttaagcagggtgaaaaaatcactgaatagagaagcgatgaaagatttgggatatgtaataggtgagactttgataaatgcagaagaacattcgtcgttaagatatagatacttgattggatattttgaggaatgtacagaagataacagacattttgggatgttaaacttagtgatattgaactttggacaaactatttatgagaaatttaaatatccggatgaaggtgtttctgtgaattcggaatgtttgaaaaaaatgaaagatttgtctgataacttccagtctcatagttggtttaaaaaagacttatttacggaagaaacattatggacattatattcattgcaagaaggcgttagttgtattcccaaggaggtgtgtaagagaggaaatggaacaattcaatttattaacagcttttttaagttgaagggcgacgataaggctgatgacatctcgcgaatgtatctcttgtccggcaatacaagaatagattttgacgggacctataaattggtagatgcacaagatgaaaatggagtaccgcgaggaattatttcttttaatgaatcaggaaaattaacggatattccagatcgaaaatatgttcgcgcagtaccttactattttcctggaactgctatatttgcaaaattattaattaatgatgatgatttgaataatgaataaacaaagtaacatcgttgatttggaggattttagaactcaaatcggcagcgtcaaatcgaaagtgtttaccggaagagatcgtggagaagaagttcgcgataaaagccgtttgaatgacttgtttgagaagtatgataaagtgaaacttattatacctaaagatatatattccattaccccatcctttttggaagaattgtttagaaacatagtggagaaaaacggcaggtcaatcattgaacagaaattggatctagagacaaatggttatgatttacagagcccgttagaagaagcaattgaaagaattcttcaacataagaccggtttagataaatgatggatatggatatagcgattattgatagcctaacaatgattaaggatacgattatgattgctgttccacagcaaatgccacaagaaccggattcacttatgaggattttggatgtattttataaaatagcgatgattcttatcgctatatttaatgcttggttcgcttatacgatacataaattgaaaaacaagaaagaagatgatttcaaggaggccgatagaaaaatagcattgctcaagactcttatacttgattataatttaaagtttgtatatgagtttttcgataatctagaaacacatctaagtgggttgaatgaacgggaagcggataaaagaatcatagaatcccatatacaagctgattttaagaaattgaatgaaaagtttgtgaatttattgtctgctgttgataggaagttgtatgataagattttgaatataagcgatgcttgtagagatgaacttgttgcaaatataggaaatgaaggtgtaaatttatacgttgaatcacagtataaaaaactgataaaaaagcctcataatgatataaaaagaaaaatactgagtgaactatttggttacaaaggcatgtaactgtgacataatctttttgcgaagcggagcaaaaaactccgcttttcttttgttgtttcaaaataaactcccatctttgcagtgcattccattttgaataggcggagattgttcgccaacttttgccgttggcattttttatgcctatggatcaactataagttccgacccccgtgtggagcgttaatgcgcccactgcctattcaaggtggaatgcaacgggaaagcggaactttctttgtttataagtttttccgattttttggagaaggttccctttcccgtctttaataacatattgtttcattttaattgcattccaaaatgaaagaactaactatcggtacgcagtccgtacctgctccacgcacatccgtgggcgaatccgtcaatgctctcaccgagcaagtgaataacctccagcgcaaatactaccgcgccctggctcctgaccttgaaatcaagaccgagtccgacaaatggtatttccgtgccatcggctggacgtgcgccagcctggtgttcccgccgctggtcatcgctgtcgcattgtgcgtttataaggcaaagaaagggaaagggggtgaagtatgactgagataaatgtaaatggggtcgtactgaatgattctatagctaagcgtttatcggatttgcaaaatggtaatgcaaaattaattgcaggctttctggacaatagtattggttttcttttaggaaacagccaatatttttgtggtgcagaaagagaactattagatgttttgtcctccttaaatatagcacgtaccgaattattggggattattccggagaagaaaggaggcgtgagatgaatgaggctgcaaagaatagcaagaatatataccgggtggaataccagcttgaggttccggtatcagcagggttgaaaccattgttccaacagattgaagaaatacggtctgaattgggtacagagccttcggatgatgatttctgtgtattgtttccgtgtggaaataagtatattccctatgcaaccaaggctttgatacgttattcgcgaaaggatgccttatcggttctgaccggaggcatgagcgatgaggattacatcatgcgccatataggttcgactacagatgctgatggtaaggttctgacgcatgaggatggtggcctggataactttgccgtagaggatattttctaagaaacatttttttatacatttgagaagccggtggtccgtgatggatagccggtttttttgtgtgttaatagaaatatttctgttatttctttgccattaatagaaatttttctatatttgcagagtcaaacaataatagaaatcaaaaatgaagtattcagagtttcatcggaaaatcattgcggcaggctggaagttcagtcacgcagaaggtagtcattacttctacacaaagaatgggaagctttcggagccggttccctatcacggggccaaagagtttcccgaaccgttaagaagaaaaatagcaagggcgatgggggtataatccccatcccttttaatccaaatagaatcattgaatcatggaaaagattattatgaacatttgtgcaagtcctgatagttttggggcttattcagaaaattgtgagggcatctatgcggctggagataccgtagaagagtgcaagaaggatgtggaagtcgccattgctttgattaaaaaaaatcttcctgaagagcgttggccggaacaaataaaaggagaatatacattgatatggcattatgatatacagagcttattgcttcactacggcagcatgttgtcacttgccggattggagagattgaccggtattcatcaaaaacaactgtgggcatatatgcacgggcgttcaaaaccgcgcattcaacaaaaacaacgtatagagaaggcgctgcatagttttgcggatgaacttgcaagcgtatcggtactttgatatagcttcatttcactgttattgtttgacagcatctttgtgatgaagttggagaggtttccttcgggagacctctttttttgtgtcctttttcaaagatacagtctgggctacttttgctgcatgggagcacatgcagaacgattatcgcaaaataataaccgcagcagctggtggagcaagaagaaccggctggctgataggtttccgctggacatcacgatagagggtgataccggcattacgcagcagtttgagcggcagcaggatgcgaaagcggttgcggaattcaacagtcggatacgcgcctggggaaagaaagtgaacgaggcgttgcaggcgagcgtatcgaaatggattgatgaagataaaaagctttcggcatccattaggcagaattaccggcattggggcaaggtgccggctaaaggcgaggagattacgagcatcggcttcggattcaatgccgatgggctttatgttcatctgggtgtaggccgtggatataatatggagggtggtacacgggtaatcaccaagaaaagcaacaaggattggaaccgggagccgaaaccttggtttaatcccgtgattgaacagcatataccggaacttcagcagatagtggtggattattgcggttcgctgttcattaatacaacgagaatttatatcaatagatagttatgagtgagataaagaagataggcagtttcagttttgtggatacggctgccgggcaatatgccattaacatgaactggagccagagcatgagtcagttctttaatgctggctcgcaggactgggacggtgacccggtatcggtggctggtgtacgtgtggttccatggggcccggacaacaatatgccgaatgccatccgtgacttgctggagaagaacaacctgggtcccggtattctggaccgtaaggtggggttgctgtatgggcaggggccgatgctttaccgggtgaagattgagaataacgaacgcatccaggaatggatggaggatgccgagattcaggaatggctggatagctgggactacaaagggtatatacgtgacaacttggttgaatacacgcacatgaacgggcatttcaccaagtattatatgggcaagggagtgcgtatcggccgcccatgggtgcagcgattggagtcactgcacagcgaagaaagccgtctggtgtggccggagaatgacagccgtaggcttgaggatgtcacggaatacctcaccggtgattttgattccttcaagagccgcacgttccgcaagtacccggcttttgacaaatggaatccgacccggtacgaaacagccattaaataccactgcatgcggagctttggccgtagtatgtatgcgatttcctgcttctatgggtcggttccctggctggagaatgcgaacaaccttccggaaattatcaagcatctgaatgagaacatgattgcagccgcttatgtggtgcattctccgcaggagtactggaaccagaaacatgagctgattatggccatgcacgaggattgggatgagacgaaaattcagaaagaaatggagcggctgaaggatgaactgactgaaaccattgccaatgtgatggctggcaagaagaatgccggcaagttcttcagctgtgtcgacttcgtggatgccgacggtaatgcccagagctggaagatagagcctatcgagatgaacatcgacaagtacatcgaggcgcaggcgaagatttcacgcatcgcggatagttccactaccagcggtttcgggctttctccggcattggccaacatcatcattgacggcaagagcgacagcggcagccaaatgctctatgcattgaagatattctacggggctgacacgcagattcccgaggatattgtactggaggcaatcaatgatgccatacgtatcaatttcccgcagaagaagggaattttcctcggtatctaccggaaggttatcaacaaggaagagaatgtatctacgccggacagagcggtaaaacaagtataggcatgaaacagacagatattgaattcccggactgctgggaggaggtgaagccgttggagtggctgcacttgctgaagaaccgggagaaactgatgacgaaacctggcatcagcttgctggacgtgaagcgcgagtggtgtgcgtatgtactgaagaataggggatatgtcttccgttcaaaggtgcaggatatgctgctggtagaccgtctggccgaaacattggcatggatgtggagaatggagggagacgctgtggtactggcgtatgactcgaccgtgaatctgataccggaatggcgatatcttcgtggtccgatgagtcatggggcggatttggcttttggagagtttcgtcatgcggtagctgcggtcaataggtataatgtcgggcatgatccggtagacttgcaggcattgtgtgccatcctctatcgtcctccggtggagaaaaaaggctgtgtagagcgtgaacccttccgtgagcaatatatgggcagatacatggggcttgtggagcacatgccggtgtggatgatgtgggggatttatgcttggttctcctacttctgtgaatacttgttttccggtactttcatcattgacggactggaactgtgcttcggaccggtattttcccgtggaagggacaaggatacccggcagaatgatgtgcagagcctgggcatgaactcgatactcttttctgtggccgaaagcggagtgttcggcaatgcgagggctatcgatgatacgctgctgctgcgtgtgatgatgaagttgctcgatgataggcagcgggcagacgaactgatgaggaatctaaaaaaatgatgttatgatattcaacaaagacggccaaggtgccaaagaattgcgtgagttgaccgccaactattacgctaacaatgatttcaccaaggttatcggtgagatagagctggctactgaagaactggcgcagttggtcggtagcaaggtgatagaactggcagagaactattatctcaatccggagaaagaaggtactgatactgggattgtacgcaaggtgcaacggccgattgcgctgttggccacattgcggctgtatcagaagaatgacctcagccatgaggatgacgggcgcaagttcaaggtggctaccgacggcagcgaaaaactgccctgggagtggcagttggaccgtgatgacgcgctacatctcgaagaatactacaaggcggtggatgtgctgattcgttatctgaatgacaagaaactgaaagagtggacggacagcgacatgtataagtctgctcaggcgttgataatccgtaatggggtttctttcgatacctatttcccgataaataggagtgagcgtatgttcctgctgcttctgcctttcatcagagaagcccagcagttgacggtgaagcgggcatacggtgccggttgggaagagctgcttgcggaaggctcggtaccggagacggacgcacatttcgcagcatgcaaggcggtggcgttgttggccatgagcatggcgcttcgtcgcttgtctttgggagcaataccggggggagtgatccgcaggtttgtggctgaaagcggtatgaatgaaagtgaaccggcatcgctcgacgatgtggagcgtgtggccggatggatggcagatgatgctgccacttggatagatgagatgaagcgggcgcgtgacggtagcatatccgattacgagctgttaccgaaaaatgaccgtaaaaacaaatattgccgattatgaatgtgatacagagacccagggcgcgggagttctgtgctaccatgcaggactacatcattgacacggatgtgaccatagcctttgccgtaaaatatggcggtaaaaagatacttgatgaagaatatgtaccggatgccgacaaccaggtgcgaatccgagggctgggcaagttctgcgaattggcattgtggggcgtgtggtgcctggactatgcgccgcagagcaccgcttcggggacgttcaccttccttatcaacgagacagaagacgcgcagagctacgtgatgttcagccggatgcagacccggaaggatgccgcttctccgggaatactgagtgaggtggctgccaaggtgacacgtatgggggccaaggagtatgtgagtggttatccgcagaatggaggatatggcataacggcttttttcaatgacggcagccaggagagcaaatcattcccggtatcttcttcggagcctttcacggtggatgtgagtccggatactgtgcttcccggattttccaaatctgacatagccagttatacggtggccatgctcggaggctccatgcagttttacgttgatggtacaaggtatgtggatgtatggtgtttccgtttcaagaatgtgtatgacatgcctgagactttaacggctaccggtgaactgaaactgaccggaaacaatgagagtgatgcagcagccatgtacggggtgcaacgcaagttcggtgtcaaggttactgatgaatacacggtcaactccggcagcatcatgttgcagagtgattataaattatggcacaacatgctgaacgcacaagaggtggagattcttgtggatggcgaatggctgcctattgtgattacgaaacagaagtttgaacgctccttcaggcgtagcgtcttgaaggcggtggagttcagcttcaccatggcgaatcctgaacagaataatttgatagggctatgataaatatacagagatatagggagatgctggcagaactgaaagagcgcgtcaataaggtaagccggacgaagattgacgggacagtgattgccgtcagcgaaaagcatcttgtcaagaaattgaaagacagaatggggttgatactgtgtgccaactacccggatgccgtatcgcagggcactgaagacaattatcgggaacggaatagcctgctgctgttcctgattgagaaggttccgtctgggcgggagaccgatgaagaggaactgctgcattatgcacgcatccagcaggtcatgcaactgcttaaaaccaaactccgggagatggatttcttttgcggagaagtggatggagcggagagtatgacagtggagtgggagtacgatgtgttcggcggctggaacggaatgagtataggacttaacttggttgactatgactgaattgtttattgacggtgtgcaagccgtacttccgaaggatttttccattcaggtgaagcgtgagaatccgttgattaccaagaatggagaatatacctatgagataacattgcaactgactaatgctgccaatgcggagctgtatgcgcacctgaaccggttgaacagtgtgcaggaggtgaagaccaaacgctctgccatactggtagctgacaatagggtgtattgcaatggtacggagattattaccggttggactgataatacggtgtctctgcagattgcaagcggtaattctgaactgaattattttatcggcggtgatttgctgattggtactttggaaatgaagcggacggatgtgctgacaacggatatgtttccccatattgagaaaacctatccggaagtggagtattgcctggcgccggtacttgaccagggtaccggcaacatacacaatcagtggtgtgtcaaggcggatgctggtgtgaccaaccgacgggtggatacggatgatatgttcgatgtgacaccgcagccttatttgtgcgcttacatcaaggagctgatgagggcactcggatatgggttgacggagaaccaattggagaatacggtatataaagatgtgtatatctgtcatacggaaccaacggtattgtggaacaagatgctgtcgggctggatcgtgaaagatttcctcgagcaggtggagcggttgttcaatgctgtatttctggttgacaaccgcaagcgtacggccaggctgctgctgagaggaaactattttaccggaggcacatccgtgcatgtgcagaatgtcgaggacgtgtatgaggtggaggtcgaagagccggatgtggaagatgctgctttctcgaatgtgaaatataaattgccggacagtgagttctggcgctggcgttgcttgtctgatgcagtgaataaggctgctaaaagggatacgattcctgctgattatgtaccggagagatatgagcgtattcaggagtggtttatggattcggctcatcaactgacggataccatttataaggatttgagtgatggcagagaatatttgtttctgcgtaatcatgcagggtgggagaatgaaccggattatgcgatggtgaacgaattcatgaatctggagagagagaatgcggctacgacattggaactggaaatgatgccggtggaactggctgtttcggagataaacaggtatcagactggagacccggtacgtgtgagcggtatcaaactgtatcttccggttatcagcagtggcagttcggagggagatactaccatggggcagacacttgaagagatgataacaaacaatacaagcgagccttcaagtggcaagactgatatttgtctggctttttatagtggtatggcagaagtgaaagcattgggaggattgatgtacccttttccccgtccatatattgatgagtatatagctgatgcggatactggtttctccagatattaccggacgaatacagtaggggcatctcttcggttggttgcaatgaatgcacaattttaccaaggtggctatgatattgactacaccaaagcggtgaaggtccagagccatgacccgaatgtatatgccgctcaccaagtgtttgagatacgcaacaagcgatatgtctgcaaggagatggaattcatattggatgcgttcggtcgtaagggagcctggaccggtacgttctatcccatccgtatcagcgatactgaggctgatgtccggtggatattggctgatggccgttggcgtgacggaggggtgtggctggataatggccgttggcttgacggataacactttttgttcataagtgctggcctggtagtccgtgatggattgccgggctttttcatgtcctttttcaaggtgacgcttgaagatacctttgtcctggattaataggtaaagatatggcggttaacatacaagactttagaatggcaatccggattgataattcggaggcgaaagcgaagtttgacgagaccaagcggcagattgatgctgtcaaggctgaaatggcgaaattgcgggcagaagggaaggagaattcagcggaatacaaggagcagaaagagaatctggataaactgaatgctgcgctcgccgttcaacgtatagaggctggaaagactgcattgtcttactcggaattgcgcaaggctgcggcttccctcaagaggcagatggataatgccactcccggcacggagaaatggaaagcgctacgggctgattatctgctgaccaggcaacggatgagagaggtggaggtgcaggcacgtgagacccgtttttctctttccaaaatggctgatggggttaataggtatgcagctatgggggcaggagttgtcggggctcttaccgggatggccttgactgcccgcaaatgtgtggatgaatatgcggagatggaggaagctgaagcgcaagttatcaagtacaccggtatgacccgagatgaagtcaagggactgaatgaagagttcaaggaaatggatacccgtacagcgcgtgagaagctgaatgctctggccggtgatgctggtcgtttggggattaccgggaagaaggatgtattggagtttgtcgatgcggccgataagattaatgtggcactgggtgaggatttgggggatgatgcggtgaagaacatcggtaagctggcacagatgttcggtgaggaccagaaacttgggttgcgtggggcgatgttggctaccggtagcgccattaatgaggtggcacagaactccagtgcggcagaagcatacctggtaggatttactgctcgcgtggcaggggcggcaaatcaggcgaaggttgctcagggtgacattctgggatatgcctctgtacttgaccagaacatgcagcagcaggagatggcggcgacggctttccagacgctgatgatgacaatgttccaagaaccagccaagtttgcaaagattgcagggcagagcgtggaggactttacctctcttatcaaaaaggatgcgaacgaggcgatacttcagttcctggatacattgaataaaaaaggaggacttgaccagctggcacctatgttcaaggagatggggctggatggtgtccgggcttccggtgtcatcagcacgatggcaggcaagatagatgatattcgtaaagcgcaaagattggccaatgatgcgtatcgagacggtaccagtatcattaatgagttcaatgtgcagaacaatacggttcaggctggactggataaggctaagaagaatttcaaggatgtacgggtggagctgggtgaaaagctccagccggtgatgaaatatatgataacaacgggcagcttgacggtgaagggattgggaactatggtttccatcttgtggaagtacaagggggctattgttgcagcctcggctgctgttgctgcctatacgctggttgtaaaggcagacactatggccaaaagcttgtggaccactataaccaaaggtgctactgccgcggcgtcattgtttaacaagacattgaaggctaatccgttgggacttgtagcttcggtattggctggtgtcgtatcatatctggctatattcaaaaccaggaccaatgaggcgacagaggctcaggaagccttgaatgccaaaatggagcgctatgaaacgctgatgggacgtattgctggtataaaaagcaaagccgataatctggatttgctggatgatgaccagaagcaacgtacacggagcgagactgaagcagccatcagcgaacttaaggaccgcatggctgaagagatggcgattcaccgtaaatggttccaggaacaaaaggcagaaaagatgaaatggattggcgatgacaagtctttggagaaggcggttatcggtgggttaaaacatcaactgcaagaacgcctaaaattatatggcagctatgctgtgaagaaaaaggaattggaggcgattcttgcaaagctgcccgaacaagaagtagataatccggtgccaggaggaaacagcaatggagtagatgataatggccttgacaaagaactgaaggcccgtgaagagaagctgaagcaggcaatgcaggtcgagcagaatttgtggaaggaagaatatctgaataggcagcacaccgaagatgcatacaatcaggccttgcaggattctgaaatgaaatttctgctggagaggaaagctttgctggaagcttatggcaaggatacatcagatatacaagggcagatttatgacaagatgatagctgaagctgcccgtattgataaggctaagagtgaagctgaaggtaaggaaaagcaggagacctttgccgcccttgattcatcatataagtcagaccggcagcagataaaacaagcctaccttgatggggatattcgttccgaaaaggagtatcgcaggaaattactcgaagctgaacgcgattacctggagcagaaacgtgccatgcagttgcaatatggagatgatactacagccgtcgatgacaagctgctggatatggggctttcctctcaaaaagaggaaaaggacattcaccgtgaacaaggattcatggatatggattccgcttcctcattttctcagaaaaacgatattctacaggcgatgtatgatgccgatttgataacatatgaagaatatcaggcagagaagacccgtattgcagaagagcaggaacagttacgggaagatatggcgagggcggcattcgacgtcattggtcaggccgcatctgctgccagtcaggtggtaagtgctttgcaggatgctgaggtcagcaaagttacccgaaaatatgataaagagattaaggcggccaagaaagccggtaaagataccacgaagcttgaggaggagaaggaagaagccatcaaccaggttaaaaagaagtatgccgacaaacagtttgccgcctctgtccttcaagtaactgccagtactgcggttgccgctatggaggcatacaaggctatggccggtatccccattgttgggccggcattgggagccattgctgctgcggcagccattgccagtggtgctgcacagattgccgttgccaaacaacagcgtgatgaagcgaagggactgaaatccggtggttatgtggatgagtatgtggagggctataccaagaacggtaatcctgatgatgtggctggtgttattccggtacataagaacgagtttgtggccaaccatgaaggtgtggccaatccgcatgtgcgccagttcttggatgtgtttgacattgcacagaaaaacgggactatccgtatgctcaatacgacgcagatattggaacaggttcgtacacgcagcggcaagtatggcggtggttatgttgatacgagtgattactctatggcgttgtcgtccgacaaaggtaacgtcttgtctggcttgacaccggaacaacgctcgcagatcgtgaggttgttggttcgcaacaatgagttgctcgaaattctcgcaaaaaaagaattggtggttgactcccgtaaggtgcgggatggcataaaaaggctcgaagtcctggagggcaatgtcagtaggtagtgtcctttttttatggtaccggtacagataattttgcggcatgaatgtattccaggcaatagatgaaatgaggcagttgtcctccgaagggaaaagcttttctttttctttcatgagttatagttatgagcgtcgcaaaagcgatggggtcataacggtgaacaatgcacgtctgcgtaagcagagccataaagagaacaataggtttgctgattatatgctgaattttattgacttggacacaatggagtatggaatgtgttggcagcctcttctgctgacatttaatggtgatgaacttgaattggattgatggataccaagtttgaaaatatagtaccttggaatggctcgaatgataccgggcgcgatgttcgcttaaagtgggaacgaaactttaagcgcatagcggatgccttgaaggaattgtctgatacggataagcagattataaaggatatcttaaaagaaatagataaaatatatctgcataaggataaagaggacggcacaaattttctgttgaagttcggcgagtttatcgactctatggtcgcgggcaagggtgccggaatattccctgacggccgcgcgcagtttgaacgccttgaagtccgcgattcccttactgtccttgaacttatcttcaaccgtctctctgccatggagagcgactattccttctccgagtccggtaccatcgaaagtgtatcgcagcttgaagacggcacatacagcctgaagatgaagaaacggtgggataacgactttactgcactggcagaaaacgatgttgtatatggtgttgtcaatgaccttgcatcaggtggcggcaagtattatacctcctggctacgtgtcttgcatgttgacacctcagccaatacgatcaacgctgtgatgtaccctgatagcgaggtgccgggtggcaagaattatcctcctgagccgttgatgatattatcacaccgtggcaacccggttgatactgaacggcagggttattggtatctgtcatcccgtgagcattgtatctgcatgcttaacggggttacaaaacccatccttgaggaaagcaactattcggtgatcgtcggcaggctgaagcatctgtctctgttcgacaacctgcccatcaactacctgcactcttatatctacgttcggggattggtagcgcaggacatccaccgcatcgacttccaaggcgtattgccccgcatcgccaacgaccgcggcgagtggagcatggagaccgccacgggagcagaaccctaccaagccgaccgcgaggcacagaccgagaccgtacgtgtgatgatgtacgataccgtgtggcactacggatgcaagtggatgtgtcttgtttccggcactaccgacgaaccccaatacggttccgcatcctgggcaatgatcgagggcaatccggatttcagcatcgatatagaaagctccaatggctggtacttcgatgcggagcgttttgcgaccaccctcaccattaccggtgagctgtacaaccgtgacgtgacggcgcatatccttgacagtgatgtggagtggacgcgcgacacgggcaacgtcaccgaggacaacgcctgggcggtcgcacacgcggaaaccggcaagtcgctgccgctgacggtcaacgacctcggccccgactatatgaacatgaccgggtgcaagtttatcgcaagggtgctgctgcgtgacgggcagaataattatgagacaatgaattatataactttctaattatgcagactatacagaagaagatagaggtcaactaccgccctctccagaccagcggcgggatagaggttgtcggcagcgtaccgaacgtgcaggtgtaccaggctgacaaggccgagtacactccggactacacgcttacccccctgacgctgttcccccggtgcaatgccaccgacccggatgcggtgaccaaagtgggcgcggtcaacgcgtcattggtcaacatgaagtggtacgagcgcttgaacggtgtgcggacattgattacatctgccaacaagagctatgtcattaccgagaccggagcaacaaaagggactattcaggtgaaaaagaataccgttcccggcagtccggtaacactggagttctacgccgagtatgtcgatgcgaagcgtaccggacagacgcacgtctaccgtttcagccgtcttgttcgcgccgtagatggcagcgaagcacagcctaagctggtgattgattctccttcttctttggattggaatccttgccgtgatatatcaaaacatatcattaccgccaagctgcttgttggcgatgtagatgtcacagcaaccaacaagtgcaagttcttcttctatcggaagctgaatacgggcgcactggagcagattaccgacggtaacggcgacaatgactgggagttcgtctctctgacaaagaacgtgcttaccatagaccgggactatatcggccacgaacagacctacgtcgtgaaagcatcgtactcgaaggacggtgctccttcatccaagccggacagtgacatagactatgtctccaccaccatccgcaggcgtattcccgccatcgagattgactgggagggatttccgcagcaggtggccgacggaaccaagatgatatacccgaaaccggtcatccgtgatacggcagggattgtccccaatccccaggccatccttgagtgcgaatggtacacgaaggcggccggcgcctcctcatacgtgctggccgctgccgggtactcgccctccattccatgcaccgacggcatgatgctacagctgaaggtgattgacaagggcccgtatgcggcggtggtgacatctgacggcaagtacgtgacggatgacagcggtaagtttatagtggcaaggaaaagggatgtttaatttctaataatttgtgatatggcattttatatcaaggttacaaagcaagttgcggacaagctgggagtggcgggaatccgcaacggcactgccgacggcaatgtgctgttgtggcaggccgatgtggcaggctttcccggcgatacggtattcgaccgggcggcagtagtcgggggcgtgtgcctttccccgcagcaggccaagggtgagatagacggcgtggaagatccggtggaggtgacgacaccgccggaatacatggatttgccaacagaatcagaagaagagtccaaagatgaatcttcggaagaggtatcaagcggcgatgaatcaagcggagaggaatcggtcggtgaggaaacagtaaatgaaacaatcaaagaggaggtgaccgatgagcgtagcgagtaaggtcgggcaggtaattttttcacaaaagtctggcgtttacatgccagcgattatgtgcgacaaaggcgacctctatcaagagtatgacggtgagtcgggcgctccgacaaacatagcccccgacttcaccacgatgaagccgacgctctccttccttctcacctcctcacgggtggctgagggggttgtggtgccctcttccatcaggtggtatttcaatgacgtcgagatcaagttctcgggcaacgtctccacgaacacgttcggcggtgagacggggcatttcaagtacatcccctacaaggcgggcactacgaactattacgggcttcaggtcgtgaagaacctggtgaaggcgtcgtccggtgcgagctgcagcgtcaaggcggtggctacggtgaccgtgggcaacgtatcggatgaggtgcagttcgtctacagcatccccatcaccaagggggtgggcaaccagaacgtggtgaccatcgtttcgggtgatgacaagtatttcgctatccgggagaagggaggcagtgtcgttctcacggcgatggcgagacgtggagcgtcagagatcacctccggactgacctacaagtggtccaggatggttaacggtgcctggcagacactcgtcgaccagaccggcaagagtctgaccgttacggacagcctggttgacactacgggcatctttaaggtggaggtgtcgcagggcggcaatctgataggccttgacacgcagacggtgatggacttgtcagacccctacgacatcatcacgaatcccaatccagaggatgagacgattgtttccggttccggcggttctgtgacttatacgccgatccttgtcaagcggggtacgaccactaaggcgaaagatgtcctgttcttctttgtgtttatggatagcgcaggcgttattcttaatcctgcaacagcgaatgtggctgcggcaagcggtacctgcaccgaagctatgtgccagcaggcaggcggcaatgtttcatggacaatctcaacggcagcatgatatggcaaagaaagcgttggcaagcaagacgggagaagtgaagtatctccagcagggaccggtcggcccgctggtctatccgaccggggagtacgcggcatccgtatcctatacccgtaccccactgtccgcacccatggtgctgtgtgagggacagtattacgtattgaacaaggagggcaccttcaagaatattaatccgaaaaaggactatgcggccaacggcagcaaggccacctgggtgctgatggacaaggtcaggtattcgttcgtcgagattctgatggcgaacttcgcaaaactggcgagcgccgtattctacgggcagtacatgttctcccagtacggggtgagagcggacggttcggccgtggagacggagggcgggtacaaggacttcaattacagtgatccgatgaatccggcgaacgggttccgtccgaacctgctgattgacttcttgagagggagcctttatgggcggagtgttgatttgcagggtgacattacagccgagacaatgaatctgaaggtttgtacaaattcagacaatgaattacctaatggctctataatactttatccgaagaatttggggcctttaccggaactggaagctggcacttgccaggaaatgaagatgttgtttcctattgcgacaagggttcccctttccgtaactttaaccactgcatctgccaatgtgaggattgcgcccaatggctctatacttgattctgcgtcaagttatgatatagtagatgcttacggatatcatgaattaatcgggtttagatatgccgatggggatattacctattggtgtgtatttaaaaaacaaaagagtgtatgaaagttttttataaaagcgaggtggcgaaatggctattgtggtaaggctacagcaccatcacattcatttgattttaaatttacaaaacgagagtaaaaacaaaatgttaaactggttgtcgtttttatccgaaaatgacgaccctcaaaagtacaagggatatgatagagaaagttaacataacagattccaatgtagttgagttaatcagagggaaactacccattgcaacagaggtaaaaaacggtctgaaaccttccagggacatgcgacaagaaaagcgggtatccatgacatcctccatattgttgtttgagagaaaggacacatcttctttctccgatggaattctatttagtgtacagtcatacggaggaggaccggttgccctatatttcctttcaatatataggtctgaaggggtaacagcaactccttcatacaaattaaatctgataggcggtgttttgggaacggaaaatgcaaggccgaaattcaagctctataataccgatactggagcattcaaggtatttcttgagcgtagggattacacgcccggagtatatgcgaaactattgtcttcctaccatccgacaacatttgaattcatattggaagcggctgacgagagtgaggtggctgcagcgagctacatggaggagtctaaggtggggggataatctcccccattgtagtatttattcccgtttcttgtttttaccgccattggctacaagaaaaatcagaataactcaattgacttcccttttttcagcatgtcttgtaatataggatttgttcctttgaaataaaaatcatacctttggtgcattgacaacccgataatcatgccttatttgtgaagatagagcatgtacttagaaggcattgggaacgccataaagttgaattcgggttgccaccctatctctttcttttgcgcattggacagaatgtttgtttgcttgttaaattacacttcataccttttataatggatgtccaatgtgcgcaaattaagcccgttcaagccgagatggtttgagcgggctttgtttggcattctgattgattattattaattttaccgcatgtctttttaggcatagtaagtagttcttgttctataaagtaaagtccgaagagttggaatttatagaacttacacttaatcaattagttaatacagactttccgtcttgtccgtgaggataggacggattttaattataggcagaaaattggaaagacttatgaaatggtaattttattttccttggaatgagagccaataacatattccgatgttaccgcttccatggagagaatttggttcttgtttccattaacatttgatatggcatacaacataagatagccgccagaatggtttgggtatttactgtttaaataaaaactgaaagtattgtcattatcaacgtagcatacgatatagttacatattgttgaactgtaattttctttggatagacgactgtctgcgaatttgttctcccaatactttatattaacagagaaattctcattactcatattgttttggttaaaacctatagagcattgcaaccttatggcacgatattgtgccgtacttattgctgttctaattataaagccttttacatttccagctgaaggagtggaaaataactttggaaataagcctcctattaatgtattcatcacatttgccaaatcacttttctttattttcccctgactaccatctgccagttccacatacacatagtttgtatcagtcactatctgacactggttcattgcttgacttatgtttactttctctatcatatcccttgtacttttgagggtcaaaggatatgacggaaaaaagattgttatgagctctactgtcaatcaagtaaatgatatggacttccagttcgtccattccccgttaaaattgctgctcctggcttttagagtatttcccaataaatcggattttaattgccacctacactgactatagttaacgcaaaaaaacataccagaaatacctgaaccatctccagttgaattatagccaaagcctgaaccaatatcatccaaggaaccttctaaaataccataattcttaaatggaagcaagttgaaaaaatcatttttcttaattttcaacggaataccattgctttcttctccatagaaaaaatctgcattagtctttacagataagctattcaaggcttgacttatgtttaccttctctatcatacccttgtacttttgagggtcaaaggatatgggcagaggaaagatactaagaatatggctacaaacaacggcaataaatacttacagtaaaaacattcggaatctgcatccatcagcataattgttttttactctaaaagcaccttcccctagtgaaaaaaaacaaaaatggccatcgatatctgatgtggtccacatattgcttccagcccatttctcaagtgaaccatatcctaatgaaaacaatcccctattaccagagatggtaacttctgtaatatgaataagaatataagaaaaagatatatcataaaattctcctttattcaattgtaattcagaactaatagtttttgcaatttgagattttaaatcagctctatttattttcacttgactaccatctgctaattctgcatatacatacgatactttatcagctatcttaaacaggttcattacttgacttatgtttaccttctctatcatatcccttgtacttttgagggtcgattgaatcctcttttggtaacactgttgattagaggtatcttcaccgcaaaaatggtttacgcatatattcgtgtgtcgacagacaaacagactgtcgagaaccaaaggttcgaagtccaaaaattcgcaacggaaaaagggcttgtaatagataaatgggtgtccgagaaggtttccggtaccaaaattgctaacgataggaaattaggcccgcttctcaaaaggatgaagaaaggcgacactctaatcataacagaaatcagccgattaggaagaaacctgatgggtattatgtcaatgcttcacctctgtatgattaaggagacttgcgttcttactgtcaaggagcgttacgaattaggtaataacatcaacagtaaggtattggcattcgctttcggtttatccgctgaaattgaacgtgaccttatcagtcagcgaaccaaggaggcccttgcttacagaaaagctgcaggaatacgacttggtcgaaaaaagggggataaaaacacgcattacaagctgactggaaaggaaaatcttatccgaaccatgcttgaatatggttattccaaggcagctatttgtcgaaagttgaaatgtaatcctaaaacattggatgaccatttaaaaaggatgcaataagtaataggatttcaaatataaatttctatatttgcttatagaaatgcatataaataccaagagcttagtggcgacttatgttgtcatcgagctctttttttatgtcctttttcaaagttgtggaagcaattacttttgctgtcacgtaatgtcagtggaaaattgtaaatcaacaacttgtttgatttcgtctgatgtacatttgtgcggtgtcagacaaagaaatggttattagtagattattaaatgaattggtgaaatggatatgaatgattgggttatgctggtgaccgcactcggtggcatcgagggcatcaagcagcttattaagtggtggatgtcgcgcaaaaccaatgcgcgtattgaggacgcacatgctgatgtcgaggagttcaaagcattacgggagtacaacgagttcctgcaaaagcagctttcggagaaggaacagcggtttgtggagcagacagaccggctccgtaaggtgcaggatgagttatttacactgaaggaggctaattctgacttgaaactggaactggcgcttaaacggtgtgagaggaagaaatgcggtgacagagaaccgcaaaacggctactgattcgcggaaaggaaggtgtttcacaacggctccctttcccttaatattgcacaacttaaagtttaaacaaaggcgtttgcaaatatattgtatttttatgtaaaaccaaaaatcaaggaggaaaataagaatggcgaatgtgtataaattagcgccgtggattctcaaatgggaaggcggtttcgtgaatgaccctgacgatttgggaggtgctacgaacatgggagtgactatcggcacgtggaagtcatgcggctatgacaaggacggtgacggtgatatagacgtggatgacttgcatctgttaactcgtaaggacgttgttaatcgggtgctaaagccgcattattgggacagatggaaggcggatttgataacaaaccagtccgtagcgaatatccttgtcgattgggtgtgggcatccggtgcgcatggaataaagatacctcaacgcttgcttggtgttactgtggatggaatagtaggtcctaagacacttgctgcggtgaatgccaggaaccctcgtgagttgttcgacatgattaagattgcacggttcgacttcatcgaggatatatgccgttctcgtccgacgaacaataaattcaaacgggggtggatgaaccgtataaacgatttgagattcgaggaatgaaaaagttaccgtggatattaattgtactgctggcaattgcttgtatagtggtttggttccgtccgcatgagcagcctccggctgaagttcgtgtagagacgaagataaagacggttgtcaaggtagatacgatgcttatctctgcaccgatggctgtgttctggcgcttcgtaccggatgatacgacacggataggcgatacgctgcttcatcgccgacaagtggtgtattcagacagctcatatcgtgctgtagtgagcggatatgtagaccctcggctggatagtatggtggtgtatccgaagacggtatatcagacggtgacgaatgacatctatcattcggtggttgttaagccgaagaagaagcggtggggatttggtttgcaggctggttatggctatccgggtggatggtatgttggggctggggtgaattataatatatttatgtggtaagcaaatttatatttctaaaagtttggttattaagaaaaacttaatatctttgcaatcgttacagtagaacttttaagtcgtaacaccgagattattaatggtgttgcgacatttttttgtcaaaacaccaatgtaaaattttaaaaaataaaataattatgagaaagtatttatctcaaatcattggtgaagcaacagaaagacttcccaaacaaaatcaagttattggcaattattggtcaacaacaattaatgataatattggtggaaaagttacagtgactttcgtgaagcattatggcggatggaatttattatcaaccgattattagtgaatttgccccggctcccgtcggggcttttcatatttataaaagaaacggtatttgcttgtttcaatgaaaacggaattgatagagaatataggttttacagaggaggaatacaatgccaggactttgggtgaggatgttgcctcctttgatgaattcataaatgcgatagtcgcatttgtggaagaaagtggcggcagtctggaggatgccgttgatatggcgaacgacgcgtattttcaattataaatgattagataaagcaattatggcagaagaaagtaaatatgcttacgacgaggaatccgtcaaggcaataatcgaatgggcacaaacatcccaattgcccaaggaggtgacattaagtgaggctgaacatatttttgacacctctatgtatgttaatgcgaatatctgcgatataaagcagcattatccggatgctttctacaatccggccattgatagattgtatcggttgaaagaatttgtagaaggagtggctgaataagccgctcctttatagttctccgacaaagtgttttgtttcttcatgtaccgtcagagaacttcctttcaaatatttgttggtcgttgatatatctgtatgcctcgcctgatcacgggcaactactataccggcagagttagctaagtcacggattccggaatctttgaagctgtaaaataaataggtatctggtaactttaaaactgaacggagcttatagaatctgtctctaatcactcgggtagtaatcttcttatagccaggtttgaagcctttactgaataaatagcagttggtatcgttatcgaatatatgcaaatcaatcatttgctttattatttcatcattcaatccgaccatgccatctcgtcgatttttagatatgtttgatgctacaagtatcttttgttcctttaggtttatatcgcataacttaatgtttgtcagttcttccggacgaataaacgtgtaatactccattcggcagacaagaagataataagggtcattttctgacagatatttagttattcgctttaaatcctccggagagattgcagtgcgttttttatcttcttccttgagtgactttatacgttcgcacgggttagtttccatatattgtttttcgactaaccatgagcagaatgatgagagccatatcttataattgtttcgggtacgggcgcttgaatcacggtcaagtaggagatagtccaggaaatcactaatataggttaggttgaattggtaaatgtacatgattggcaaggtgtggttttgcatataatcacagagtacacgtagtctcttattgtagtctgtgaatgtattgggtttgatgctgccggctttttgcagtttatcaaggtattttgcatacatcttaattacatcttccacttttgcatattggcgagaattagataaatctgcccatgggttccatccggaacgaagtctggcggtaacagttgcaataatatcagcagctctttttctacgttcagtgattttgcttattccatccagcatatatttcttgcgcttcatcttttgttctgctgggtcgtatgcagtgaaatccacataccagttcttgccagtatggagggtgggtaacgtatagcttactatggttgctaaggaagaaccttttctttttttagaaaacatttttttctacgtttttcaagtatgaaaacgtaggatgttagacaatcaagaattaaatctgtccgactttcgtccgacctaaacggataaaaccgttgtaaattcgtgatttacaacggtttgttgttgcacgggaggagaggctcgaactcccgacacccggttttggagaccggtgctctaccaactgagctactcccgtgtttgcggctgcaaaggtaatgcaaactttcaaatatgcaagtaacggacgtacttattttctaaagaaagttgcttacaacatctgtaagtcctgatacataatgcgatacgctgctgcttttttttccagagccagcgggtaggctctcgaggaagaaggcatccggtagaggcgcatcggatggttttcgaaaagaaactccgtgaagtcgcctactttgggcttgtcgatggagaactgcgtgcacagtgtgtccgtagccttctcgccggtagtgacgatagccttgcattgcggtatccggtgtagcagggcagggacgtccgtgggttgcaccacttccagaaacttatccgaggcattgtcttgcaggcgccgtatggcagaggctgtgtcgaacaaagcaatacccttttcctgcaggaaactgatgagacgttctttgcagaaagccttcttcgttttgtctacaaaataatccttgtcattgaagaaaaggaacccggtaatcctccacatgtcattgttccagttggggtagtaaaactccatggaccaccgctttttctgcggaggaaagcttcccagcatcagcagacgggcgttgccgggaaggaagggttctaaagggtgttgttctatttccatactttccaatttcattgttctgcctgcaaaagtacggaatatatcttggatatgctatcctgcaatgtcctgattgctcattctgtcggtgatttggaaggggaaatcaggatattcgtagaggctgaaccgggattccgtcttgccttccgtatagttccagatggtggcatattcttcggcgtcttctcccatggcttgcagctgacggaggtaggaggctatggacttgttttctacgatatatatttgtcccagctggtctattatagggctgtggcgccgggtgccgtcatggtcgaaccgtaggatgcgcttgccttcgggggtgatgcctaccatgttgaaggtcatgctcttgccgatggcgggcagattgagtacattgcggtcggtggcgaggaaaggcaggtggtgcgttttcaggaaacgccggatgcaggctgccgggtcatggacggttccaagcagtacggacagattatgggcatcttccttggtcagcttcccgaagcgcttttcttcccgttgctcttgtacggaacggctgttgggagtaaacacggcattgttttcttcaaaacctttcacggagaaggtgtagtagcaaaccactcccaactgattgagcacttggcgcaggcgggtggtatgcccccggcgggatgcagctacgttgtataccagttggttgtcaatgagccagcctgccgccagcagtttgcgtattccttcggcagcttccggagtgacttcgagcggggtttggaaatgtgtctggataatgaactggcggatgccgatggtagacgccttttccttgaattcccttagaatctccaccagcccgtcattgatgcgcatgggcaggtaggcggggaggcgtgagccgaggcgtacgcgttgcagctctgcatacttttctccttcgggccgttcctgattggctttccgcttgcggactgccatgcggtagacggcatccagaatattgcccagcgtcttgttttggctcatcagtgcgtcaccgccggtgatgagaatgtcccgcagttgcgtgtcttcctcaaaataggccatcagccgacgcagcttcttttcccatgtttccttgggacgcagggtgtcaaactcaaaattgagccgtttgctttgaaagtcgtacatacgctgacaagatgcgcagagtcctccgcaggcgcgtcccatggtgtcggggatgaggatggccacttccggataacggcggtggatgttatgcccgtcgggcagcagccagccggcggcattgggtttacctggttctacgatatcctcccgttcccaggcacgtatctgtccgtaggtttccaccagttggggtgaatagagtatatagctgcgcagggcctcgtcgtcgtatccgctgccggtgcagttcagcagtgacagataatagggggtggcgaagaaaggcattcccttcttacgggcttttgagagcaggtacatggtttcggcagaaagggagttgccgagaagacggtttagctccgtagggcttttgacggccatggcaagatggaaacggaagtcattccaccattcgctgacgaggttgaacttctcctcgtagctgagtccctcttcgaaatggaagcgggaagccggggtcttgcggtgctcaatcttctgcaccagtgcatgcaggatgcgttccttgttctttgcacggatatgctgcacgtcttcatccagtccgctgggccagcgttcggtcagggttttgattttctgtgcggagggcagggtgggggctggttggtggaggcgtttgaactgctggaacaagtcgatgaacaggtccgtttccgtttcctcttcccattgtcccgtgaggaaggaatgcagcattgataaagttgatatgggcagctgttctccgatggagagctcgtgtacttcctgcccgtcaaattcaatcaagagtcgaatttgcttaccggcctcgctgtccacttccggatgtccggcaatgtactccgtcaggttggccttgaaggcttccgtatcgtcgctttgaacggcgatgctgaccaattcagggagttcgtgccgataaagttgttccagttgtgagagagtgagtgcaagcattttcttttgtttcataagcggttgtttttttgaagttaatatttatgatggttgacgcggggtgcgtccttgtgttccgtgaggggaaaatgatttcatttgctaaaaataacaaaaaaaagcgggaaatttctttcccgccttcttgtttctaaagttctttagaattctttttcttttatttctcttcgttggctttctgtttcggttcctttttggccagcatcactacgttgtaaacgtactcggtcatccattgttccgaatatcccagacgctctttgtactggcgtactgccgctgccgttttgtgtacatcgtcctttttccatacggtttttgtacagacgtcgtgtacggttttttcggtcatgctgcgcagtgctcccttgaagatggaaggcatgcggaatttccactgcatcaggtttcccatcagcatcatcaagtcattggagaagccttgatacataaagagataaccttgtacgtcgttctgcgtacggcagtgcttcttgacggaagtatcaatttccttgaagaagttttcactgatgccgtagtcctgcatcagcatcttgcgcgaagcggccttttccgcttgtcccaggcggcctccctgcgtggggattttgaacagacgcttgaagttggctacatccggcacaaagcggatattggtgatgcccaggttggcggctattacagactggaagtagacgcgtgtcagtgacacgaagtcttccacattcttcgaagatacttctccggtattcttgttgaatagtttggcaaataaactcatatcaaattacgaattactgattacaaattacaagaccgcgggtcatccggcggttccggctgcaaaagtacgaaataagttggttatcaccagcactctatgtctttttctacctctttcaggcggttcttggtgaaaacggggtctttgataccggcgcttttctttgtgcggtagtcttcaagcagcctgaaagcgtattttccgagcaggctgatggcaataagatatacttttccttggcatcgcctttcccgtctgagtcacccagcagacgtaccatttcctttatcatccggaactgtacaaagcgggttctcaacgtaaaccatacggtgcatcccaatttagtaaaaaactcacataaaaaaagtgctatcctctgtcgttattcaaggctacctctgtcgttaactgagatagataccttgcaagttgatgataacaacgtagtatgaactcgcatgctgcaatttgtaccatggacaaatctggaaaacctgacggaatctccttgcctatttcagcctgaagtgaaatttgtgtccttcaaacaccggttccactatgtcgtaacgaacaaactttgccagcagatgttcggcggcgcgtcgggaaagatgcgccagacggcagtaacggttcagtgaaaggcggtcgttttcttccagcagattgagcaacagttgttcccgttcggtatattctatcagttctcctttcggacttccgctttgctgccagacgcgcagatggacgggagtagccaggatgttttcatccttgatgcggagataagccaagtattttcctgtttcgtccttggcatataccggcttccggtcactttcctcgatttgtaccaccagcacactgcggccttccaccagataggtctgcatggtgtagctcacttcggggctgcaataaagtccggcagccgcttctatcatatattgttcttcgtccgaacggacaccggcaattttcccgttatctttcactccgatgagcagttttccaccgtctgtattggcaaaggctgaaagggttttggctatcttgcgggcgtcggatatttcgaacttgaaatcctgctgttggtgctctccttcggctatgagagcgtgtatatattcggtgtcagtaagcgttttcatgcttgcaaaagtagataaaaaacgcgtaagagcccctttttgcggcgattttaccgaatatttcaaaaaaaatatcgtttttctgcatttatttcaagaaagaatgtatttttgccagacattattaacgaagtaatttgaaaaggattatgaaagaattagttgaaaaagtagctgcattgtatgcagacttctcaaaagatgcaaatgctcagttggaaaacggtaacaaggcagcaggaactcgcgctcgtaaggcttctttggaaatcgaaaaagctatgaaggaattccgcaaagcatctttggaagcttctaagaagtaagaaaaaaagcatatttgatgctgcgaaagactgccactgctggcggtcttttttgtttttgaaaagtattattgctacttttgacgcaggtattatggatgaaaacgttctcaataaattgaagatactggcagagtcggcaaagtatgacgtctcttgttcctccagtggtacggtgcgctccggcaaggcgggtatgctagggaacactgtgggtggttggggtatctgtcacagctttgccgaggacggccgttgcatttccctgctcaaagtgatgcttaccaattattgcatctacgactgcgcctactgcatcaaccgccgcagcaacgacctgccgcgtgccacgctgtcggtgaccgagcttgtgaacctcaccatggagttttatcgccgcaactacatcgaagggcttttcctgagcagtggggtggtgcgcaatcccgattacacgatggagcgtctggtgcgtgtcgccaaggacctccgtactatccatcgtttcaacggatatatccatctgaaaagcattcccggcgccagccgcgaactggtgaacgaggcggggctttatgccgaccgtctcagcgtcaatgtagaaataccgaaagaggagaatctgaaactgcttgcgccggagaaagaccataagagtgtatatgcgccgatgcgctacatccagcaaggggtgctggaaagttcggaagaacgcaagaaacaccgccacgctccccgtttcgctcctgccggacaaagcacacagatgatagtaggcgctaccgccgagacggacaaggatattctgtatctttcgtcagctctctacaaggggcctacgatgcggcgtgtctactattcgggctatatttccgtcaatacctacgataagcgcctgccggcattgaaacagccccctttggtgcgcgaaaaccgcctttaccaagctgactggctgatgcgcttctatcagttcaaggtggaggaaatagtggatgatgcctatcctgaccttgatttggaggttgaccccaagctgtcctgggctttgcgccatcccgagcagtttccgattgatgtgaacaaggcggattatgagatgttgctccgcgtgccgggcatcggcgtgaagtctgcacggctgatagtggcttcccggcgtttctccaagataggtttctaccaattgaagaagataggggtggtgatgaagaaggcacagtatttcattacctgctgtgagttgcctatgcacacggtcaacgaactgaccccacagggggtacgcagtctgctgctgcccaagcctgaccgtaagaaggtggatgagagacagttggtacttaattttgaggaatgaatatttttctgtatgaccatacgtttgagggattgctgacttccgtgttcgaagcctattcccgccgtacctttcccgatgcgctgcttcaggaaggagagccgcttcctttgttctacgacgggctgtttaccgtggtgaccgatgaggagaaggctggtcgtgtctggcggggattgcagaagaagctgtcgtctacggcacttgcttgtctggcccagtgctggctggccgaggagccggaaactcccatgctccttttccgctatattcgcaaggcaatagatgctcctcgttccattgaaacaaattttgccgaccttgatgtgctggagttctcccgtatgtggaagcgggtggattgggagcgtatacgcctgcttcagtttgtccgtttccagaaagctgcagacggtactttctttgcggctgtcgagcccgagaagaatgcccttcccctggtgacggagcatttcaaggaccgtttttccgaccagcgttggctgatttatgacatcaaacgcgcctatggatactattacgacttgaaggaggtgcgccaagtgacttttggtgaggacagccgcgaagggcatcttgtcaccggcatgctcgacgaaagtctgatggacaaagacgaacggcttttccaatctctctggaaaacctattttaaggcaatctgcatcaaggaacgcctcaatccccggaagcacaagcaggacatgcccgtgcgctattggaaatatctgacggagaaacaagtttaatgaagaataaggaatgaagaatgaagaaattagccgcgctgtggtaccgaatggtaattcttcattcctcatccttcatccttttagttgataacccagtgcttgtcgtggggtactgttttcttggggtcgtaatgcattccgtcctgcgtaggtatcttcagtgtataagtacgtccgcttttattcatcagcgaggtgtctcgcagccaggggttggcatctttcagttgggcataggtgatgcctttccctttggcgaactgtgccaggttggcaatgcccgttgtgacggtcacttccgtgtaggggatgggcggataaagatgttcccgtttcaacagaaaaccgtactgttgcggattgctgatgacggctttggctgccagcaggcgaaacatgtagcgtgaagtttcttctaccagccataagtcgacagcctggtctaccatttgcttctgtagctgtgtggagatgcgtccttgcccggcattgtaggcagcggctacgcacagccagttcccgtatttctgataggcatcttttaggtacttgcaggctgctttggtctctttctcgatatggtatcgttcgtcgatgttgctgttcacctccagtccgaattcgcgtccggtggcaggcatgaactgccataggccggcggcacccgcaggcgatttggcaagcgggttcaggttgctttctatcacagcgaggtacttgaagtcatcgggaaggccgttggcttttagtataggctctatgacggggaagtagcggttggcacgcttcaccatgagcatggtggtggagtgcatgtaggtgaaggacatcagttcgcggtccatacgttcgcggtggtcgtagcgaagcaggtcaatagcttgtccggcaaaagtgatcttgtccggtacgctgggggaggttatgcagtagggaacttcggatttcacggaatcgcgttcgggattcagcgtactgctgcctgcgaggaaggggaggctggaaccagcgcacagtgcaatggcaacggtaagcacgatatattttgagtttttcttcatgtctgtatgcctatttctgtttggagacgtgaagatacgaaatcaattcgttataggcaacctttcccatagccatcgtggaatcatacgccaaaaaaacaccactacccggtagcgtccgtcaatgacaactacccgtctcttttctcttaaagccttgattatgtgctgtgctacacggtctgctttcatcagcatcgggtattttccgcttttcagtaaatcggtggcaacaaatcccggacggatgtcggtgaagtgtatatcaagatgctgcatccgggcaagttgtgccagcgcttcgatataggtattctggaagcgtttggtggcagagtaggccggtgcaacgcccagtcctttggtacctgcaatggagctgatgacggcaatatgcccggagcctcttgtcttgaaatagttgaaggcggcagtcaccatgcgggtaaatccctctacattggtacgtgccgtgttcagttcgatgtccggttgtaagtcccggttttgatgtcccacgccggaactgaggaaaaacaagtccatgcctcccagcttttctatcaggttatggaggtgtaggggcgcggtctcttccgtaacgtccagttgttccgtgactatccggtcgggtgcggtggcttgcagagcatgcaatgcctctttccttctgccggcaatgcctatatgccagccttgctgtacaagtatcctggctacttcttgtccgatgcctgaagtggcaccgatgatgatggctttctgcatgatgataggggattatccgatgacggttgctacaattcttcttcctccgccccgattgcggaactcgcagagatagatgccttgccagatacccatgttcagacgcccattggtgatggggatggtgaggctggttccgctgagggttgccttggcatgggcgggcatatcgtcatcgccttcgcatgtatgttggtaataaggttctcgttcttttacgaggcggttgaagatggcttccatatctgtctgtacgtcagggtctgcattctcgttgatggtgaggcctgcgcttgtatgcttgatgaacagatgcaggattccggcaggcggaagcggcggaaggttgcgtataatctcctctgtcaccaggtgaaagccacgtcggcgaggggtcagggtaaattctttctgtgtggtcataaatcattgttttttgtttgttgttaggaatggccttgtccggcagggcagttccacggtgaatgtgcttcccactctcattgtcgaatttacggtaatcactccgttcattttctcaacgatggatttgcagatggagagtcctaatccggcaccttgggcaaaggagtccaccttttcgaaccgttcgaatatcattcccagtttgtcggggggaataccgcatccagtatcggaaacactgattcttatgccgtctgtgtccgtttcgtagtacacttcgatatgtccctgcacggtgttttttagtgcattcgatatgaagttgttcagtatctgtttgatgcgcatagggtcgtgctctatctggccgggggctgtcggatgcctggcaaagagtttcacttttgccggaacgttccgttcgtactcggtaatactttcctcgatgagttctgccggattgaaccattcggaatggagctctatatgtccggcctctatcttggaaaggtccagaacgtcgttgattagtttgagcaacagttggttgttgtggtttatcaaggagatgtactgttccttttcctgctcgttttccacgtagtgcagcaggctggagaaaccgataatcgcatttagcggcgtgcggatttcatggctcatattggcaaggaaagcggatttcagccggtctgcctcttcggccttttccttggcttgtatcagcattgcctccgtctgctttaattgggtgatgtcgtaattgatgcagataatctctatgatgttctgttcaggcatgtagcgttctacaatgatgttgacgtgggtccacatgaaagaaccgtcttctttaagaacacgtacttcccggctgagcttgtgtgccagtcctctctttacgttctgtaggaagtcaagcatgatagtacggtcgtctgggtggagatgattgtaggttccgatgatttcggacaacggtgtttctgttttctcacccaagttcttgtaccagctgcgttgggcatagccttgctcattaagaaggtcataattggcatatcccactttggcatagtcacctataagctcaaagtggctctcgaactcttgtattttgttgtaagcgacggtcgtttccgttttgtctgcgttgattagcagatagttggtcaggttgtgattatcgtcgtaaaggcttgtgactttggttacaaggtctatggtgcccgtcttcttctgtgtcttgtagtaattgcctattttagagaagtcataccggaaagtgaagtctgcattttcatgttttcttaacttacttttcatctcttccgggaaaatcggattctcgaaaatattgattccaagtagatcttctttctgtttgagatggaacatttcctgctctttgtcattcatatctatcaatattccctctcggttatagagctcaattcctaccggaagatatttataaatattatggaggagacggttacgctcttgtaaggcttgggatgccgatgacatgtcgggaccgtcttgtgtttcggcaatgccgtagattttgacattatcgttttcgtcggttctctgtaggcataccttgcttcttatccacgttggaccctctactgtgttgagcagatatacagtctcttgtgcctgccggatattgttgaaggaatgtgtggtagtatgccgttgttcctctttcagaatacgtttgttgaaatctttaaagctgatggttccattctcatccagtcccagcaaccgggagatatatccggagcaaatgtaactttcggtctttaaatcagcttcccaccatcccatattggcattggtcatcattgctgacagtaagtcataatcaaatttagaattcataccggaatctttaatagtggtgtttttgttctgtcacaacaattaagatattgacaaagatacattatttccaaattaatatgtgatgaacggaaataaaaataagggttatatgtgttttggggaaatgggaaaaaggtacccgagtttttgtacttgtcggaataagacgtatatttgttgcaatttttacatcttaacaagaaaatgccatgaagcgtattggactctttgtaatagtttttttctgcatatcactcttactccatgcaagcggcccgcgtgtcttgtttatcggagattctatcacggacggtaactgggggaatgcctgtgggatgcccaaaccgactgcggagcgaagtctttgggatatgaaccatatttatggtagcggctatatgtatttgtgtgcaagtcattatcaaggagatttcccggaaaaggaatatgctttttttaatcgtggcatcagtggaaacactctcagggatttggagaaacgctgggaagaggatgtcattggaatgaaaccggatgtgctttccgtcttggtggggacaaacgatgtacattactatctgcagggtgacaaaaaagagccttttgattttgaaggatgggagaaatgttaccgttccttgcttgaccgttctttgcaggtcaatccggaattgaagatagtgctgggcgctccttttgttgccaatgtcggcaatatgcgcaagagtggggattttgcagaacgtgacagtctggtacgtcgctgtgccgccatcgtagagaggatagcgaaagactatcagacggtatttcttccttataatgcgatgttcgatgaaattctcggcactgctccggcttctcaagacacctattggatttgggacggtatccaccccactcctgcagggcataaacgaatggctgatatgtggataaagcgcgtgaatttataatttatcaataaaatagagagtaatggaaaaagtgattatcaactcgtacgaggattttgaaaagctggtaggccagcaaatcggtgtttcggaatatgtagagcttcctcaggagcgtatcaatctgtttgctgatgcgacattggaccatcaatggatacatgtcgatacggaacgtgccaaagtggaaagtccttttaagagcaccattgcacatgggtatctcaccttgtccatgttgccatatctgtggaatcagataattgaagtgaacaacctgaagatgatgattaattatggtatggacaagatgaagttcggtcaggcggtattgtccggacagagcatccggctggttgcccatttacaatctctgtcgaatctgcgcggcgtggcaaaggcggaaataaagtttgccatcgagatacaaggtgaaaagaagaaggcactggaaggggtagctatatttttgtattatttcaattgattatgcgtaagatggtatgccctcaatgcaaagtgggggcattttttgtgatgaatggacaaggtgagcgcctgccggtctatatctctgacaaaggcgagattgtgcctaaagacagcacctcttcattggaaggatacgacctggatacggtttattgtttgtgctgttcctggcgcgggactccgaagcgtttggtgagatactgatggacatactcctgccacaaatggcagagtgccgctacgggatgatataacagcatccgtggtccggcataccgcatgacttcacgcatccgttctttcattttgggcttgtagcagtgaatgctgcattgcctgcaggtggatttattctcaccgaaaggacagcgtgaaagacgagtgcgggcataccccagcagttcctcgcattggggacacaattgcttgttaccttcctttttccggcagtagaggcggaccatccgttctactgtccgtttttcctgctcgatacgggacggcatgtttattgtttggactgccagcgtttcaaggtcgggaagaattctttcataccggcaatggcttcctctttagtgaaattcattccggaattcttgttgaattcgtcggtgaactgtgcacagtgttctatcatttcgtccatagtgcagtcttgtgcaaaattgccgtgctggtagcaataggtgcaatattcctcgttgaggctaccgtcggcattggttccgagtacttctgcagatgacaagggcattccgcagctttggcaaagtttagcttccataatgtgtggagttaagtgatatgcaaatataggatattattttggttgaagcgtccttttcagataaatcatgtctttcagttgcttgcctccttcaaatatggggtggtcgtaattatcgataaagaaatcgggtacccggtgtgagtatgcaaatccgcagctttcatagaaggggatggttagcggactgtctccagtgccgacaagcatagtatggcaccggtctttataatgttcaagaacgaatgctatcagttgtcttccatatccctggcgctggtattccggatagacagctatgctctttatttcgtagattcctttatcctcgcaggtgattacacaagacgctttgactgtatcattatcggataggatgaacatctctccccgttccagataacggtcaatcatggactcttgttcgtcggcaagcagcagcaggtcaagatattgctttttgttgccggatatgggatgtattcttatcatatttctgaatttctggtgtgaagttagtcattttctattgaattacaatggatatctctttttaactgttgaatggttgagagttgccggtgaacaaaatctgccatacgccgttcttctcataatatgataatctgatgaagttatgagtaagttgaaattctcttttctggttttgatgctgatggtatcagtctcggcttctgccgattgggcacctgctgatgtacaagctgcactgaagaaaatgtatcctacggcagatgatgttgcctggtcgcatgatgaatcttattatgtggcagatttcctgatgaacggttttgatacgaaagtctggtttgacgggcaggcgcaatgggtaatgcaacagacggactgggagacaatggacgaagtgccccctgccgtttacaatgcttttgccgccagtgaatattccggagggatggtgcagaatgtcacttgggtacagtttcccaaatggcagtccatcgtggcggtagaggtagggatggcaaatctccagacgaaatatcagatattgtttaccccgacgggcgaaatcatccgtgcccgtaatgtcacctatacatacaatccgctcggcgcagccactttcttgtaacgtctgttcgcatacctgctgaatttatcatatctttgccttcccaaaccagacttttatggacaaagacacttttcagcaggaggtttataatgtagtggccgcaatccctccggggcgggtggtgacgtacggacagatagcctatcttgtcggaagacctcaatgttcgcgcgtggtgggacatgctatgcacgatgtgcccgacggcatgtgtttgccctgccatcgggtagtgaacagccagggcaggctggcaccgtgctgggcggaacagcgggctttgctggaggcagagggcgtgacgttcagaaagaatgggtgtgtggacatgaaaaaatgccagtgggaattcatgaaagagcaaatacaataagattatgaaatttataggtgcacatgtatcggccagtgggggagtggaagcggctcccgtcaatgccagtgagataggggcaaatgcttttgccttgtttaccaagaaccagcgtcagtgggtggcaaggccgctgacggaggagagtatcagggtgtttaaggaaaattgcgggaagcttggcttcgattcccgctatatcctgcctcacgacagttatctgataaatttagggcatcccgaagaagaagggttacagaaaagccgtgccgcttttctggatgagatgcagcgctgcgaacaattagggctgaagttactgaattttcatccgggcagccatctgaataagatttccgtggaagagtgtctggacaaggtcgctgaatccattaatcttatattgggcaagacgcacgatgtggtggctgtcatagagaacacagccgggcagggtagcaatgtgggaaacgagttctggcagctgggacatatcattgaccgggtggatgacaagtctcgcgttggagtttgccttgatacctgccacacgtatacagcaggctatgatatagtgaatgagtatgacaaggtgtttgaggagtttgacacagcggtaggtttcggctatctgcgcggtatacacctgaatgactccaagaaagcactcggctccagagtagaccgtcacgacagcatcggcaaggggctgataggtatggatttcttccggcgctttatgcaagatgtgcgttttgacggtatacctattattttggagacgcccgatgaatcgctttgggcagaggagataaaactgttgagaagctttgtctcctctgattgagagactatgccctgaatacacattctatacggttgccgtccgggtcgaggacgacactttcaaaatatccgtcgccggaggtacggggctctcctgcgatggtatatcccgctgtgcgtagccgttctgtctgtcggaggacagctttctggctgtcgaaggcaaaggcaaagtgggtcagtcccagtctgttttcctcaataggggtattctgtatgtctgtacggctcatcagttccaaatccgttccttcatcgaagtgaaggaaataagattcgaatcctttttgggggttgatgtacttttcattgctgctcccgttgaagtaacaggtgtagaactctttcatctcttccagtcggaaggtccagatggcgatatgatgtattctcatgagtctgattattatggtttataggatcatcatttattgtattactttgctgattataaatcagcagacggtcagaattcggcttctttggtaatctttagggtttctcccgtgataggatgggtaaattccaaatactcggcatgcagataaagccgttctgctttcttcccgtaaagttcatcaccgatgatggggcagtgcaagccaagcgggtgtgctgcatgtatacgtagctgatgggttcttcccgtgcgcggatagaaagcgatacgggtccgctttccgtccagacgttccagaacttgataatcggtgatggcgggcttcccgtgttcggtgtgtaccatttgccgtgggcggtcaagtggattcaggcaaagcgggaggtcgaccgtacctttgtcctctgggacgataccttcgagcagtgcgacataacgtttcctgaccaggcggttcttgaattgggcttgaaggttctggtgtacgcgcttgctcttggcaatgagcattaaaccggaagtgcccatgtcgagacgatgtaccgtcaggggaccgtcagcttcgggatattgcctgcgcatcaggctatagacggagactgcatcttccttgccgggaacagacagcattcctgccggtttgttgatgaccgaaagccatgggtcctcataaacaatctccaaattttgggagggtacctgcattcttttcaacatggggttttcctctacttgtagaccttgcagcatgtgttgcagtataggttcgcactttcctttgcaagccggataatagtggccgtgatggcgtatctctgtcttgggggaatcaccccaccagaactcggccatggcaataggtttccatccgtgcagataagcttgttgcagcagtttgggggctgcgcattcacccgcaccggcaggaggtgtcttgtgcacggtctgcccgaatatctcacagagattcttgacttctccccggtagttcagcatcccgaactgttcgaatagcttttgctgcaatgctgcagagcgggttttacgttcagacttcaatgctgaaatccgtctttcccagtcttctgtctgcgtttgtagtgtggtaatccttgctttccatgaacgttccagacgtttatattccgccttttggaactggctttcccgtatcagttcggcttcttcctgcgcattgagttctttttcttttctgcgctgttctctggctgttttggcttctttcaactgtgctttggctgttgccagtatgtcttctgccgaccggatggttcgggcaagctctgctgataaggcagcatatgctttgtcattttccagttgccggatgttgcggttgatggaagatatgttttcttcttctatcttgaaaaagccttgtggctgtagcaagtcatatacgggaggaacaaaaaaggagtgtaggttctttccggccaatatgcctgagaatgcggctaaatatccggtttctccatgctcggtctgtacaatcagcaccccgaacattttgccttggcgcaattcgtccttccatgcagtttgccgggtaagatagctttgtacttctttggctgccaatatacataacgggtgtggagtatagcagaaaggataggtgaacctttccggaagcggaatgtcggttatgggagtagtaaaacggtgcaacatgatgttgcaaagatactacttttctcttataacggccgtttgtactgcaaatctttctttcgttattatttttagaagcggtagtcttgttcgatgtatgtcatatattcgtcgtaactgatgtgcctgcctcccattgtcttgaggtgaggagtttcgaactggcaatctatcatgacgcctccatgttccctgaagaattgggcaagatggatgagggccagcttcgaggcgctggggacgagtgagaacatgctctctccaaagaaacaacgtcctaaggtcaccccgtacagtccgccgaccagttgttctccttcccatacttctacgctggcagcgagaccttgctcgtgaaggtgcgtgtaggcttccatcatcttctttccgagccaggctccttcctgttccatccgcaattctccgcaggtttgtatgacgtcttcgaaagcctcgttgaaggtgatttcgtactttcccttgttgatgagcgtacgcatggagtgggagatatggatttcgtccggaaagatgacgaaacggtccatcgggcaccaccattgtatcagttcttcccgaaatgcgtaccaggggaagatgccgttggagtacgccaggatgaggcggtcaatggataggtcaccgcccacagcgagcaacccgtcggggtcgccgtagtgagggtcggggaaagcaagtttatccgtcagttgaaagaccatatcgttattcggttgcgggttgtagtttcaatgctccgttttccacttgcacgcggacttttcctcctgccttcaatgtaccgaacagaatttcgcgcatcagcaagggtttcaagtgggcggctatcacgcggtccatctcccgggcgccgtattcggggataaaaccccgttggagcagccattcgtgtgcttcctggctcaataccatttccacctgacgggaggacagtttgctgcccagttctccgagtttcttgtcaaggataagtgatgccatcgggcggtccatgtcgtggaagaccaccgtggcagagaggcggttgatgaattcgggcttaaaggtttttttgacttgtttcagcatggcttctccggcggtgacctgactgttgaagccgatggacgcttggcgggcatattgtgctccggcattggaggtcatgatgaggaccacgtgtcggcagtcggctttccgccctttgttgtcggtcagtacggcatagtccattacttgcagcaggatgttgaatacgtcgggatacgctttttctatttcgtcgagcagcaacacgcagtttggagtcttgcgtatggcgtcggtcagcaggccgccgtcctcgtaacccacatagccggcaggcgagccaatcagtttggctacggtatgcttttcggtatattcgctcatgtcgaaacgttgcagggcgatgcccagctcggcggcgagcactttggcaacctcggtctttcctactccggtgggacctacaaagagcaggcttgccatcggtttgttttcgtccagtagcccggctttggacatttgcacagcttccaccacctgacggacggcttcttcctgcccgtagatgtgggaactgatgcgttcgtgcaggctttccaaggcgacggtgtcgtcctctttcatggcgagggcattgaccttgcaggtacgtgccagtatgtcggttatcagtgccttgtccacggtctgttctccggagtctgtgggatgtatttcccggtaagctcctgcttcgtccaccaggtcgatggctttgtcgggcaggaaacggtcgctgatgtagcgggcgcttgcctttacggcgtaggggatgacgtcgggctcgtaggtgacgccgtggtaggtttcgtatttctctttcaggccttctacgatatgtatggcttcttcaatgctcggttccagtatgtctatctgctggaagcggcgtaccagtcccttgctgcgtgcgaagtagcggttgtactcgtcgtaggtggtggaaccgatgaaacgtattgccccggtttccagatagggtttcagcatgttggaggcatccatggagccttcacccgtgcgtccagcgcctatcaggttgtgtatctcgtcaatgtagatgatggcgtgtccttcacgtccgataccttccatgatacttttcagccgcttctcgaaatcgccgcgatattgtgtgcctgccagtagactgcccaagtccagctcataaatgcggaagccggcaagccgttcggggacgttgcccgcttcgatacgggcggcaagcccataggcaagggctgttttgcctacaccgggttcgcccacatgcaacgggttgttcttttctttgcggcagagcacttgtatggttcgctccaactccatctccctgccgataagcgggttgtggcctgccagatggtcgttgaggcaggtcacgtagttacgccacgcttctgttttctcttgttcatcgggagatggcgtatcgcctgcttcttctgccagctccgcttcttcgtagtgggtaatgagcagactgaggaattcggacaggtcgccgccgactgcttcttttaggaaatggcatgcccaggaatcttccagttgcagcaagccttgtatcagatggggaacacccagctcttcggcgctggaatactctgtcaccatataggcatgttgcaggagtgaactgagctggacggaaagtcccaactcgtattccacattgtcggggatagtttccacttcttccgtcagatagttttccagtgagatgctgagctccacataattgtagaaggtatcttgcagggtgttgataaagggttcctgttccagaatggcgctcagcagatgttcgggcatgatgaactcgtgccggtaagactcggcttttctttgtgcggaagcgaatgcttggtttacgaatatcgtattttttatatccatattgtttctttcttattcttcttcctccggggtgacggtgagccggagggggaaaccttcattgcgtgccatgcgggtggctttctgtactttggagtgggcgatgtcgtatgagtagatgcccactaccgcggagttgctcttgtgcacctgcagcatcagtgtttccgcttctgccgatgatttgtaaaagacggtggtgagtacctttaccacaaactccatggtggtgaagtcatcattgtagatggtgactttgaagcgtcggggttcccgtaattctatgcgttctttttctttgaaagaagattgctgttgttccatttctttttaaaaactactgttaagacattgttctaccgttgtgtgggcaacgaaaactcctgccagtcatattcgtccccatactcgtcggctatggctatgcgtatggtgacgttacccgtctttatccgttctccggcactgatgttggcggtgtatttcacaccgttgtgcggagttatttgctctatcatgaccgacggtgatatgtaaatgcgcttcatgcccgtggtttccgccaccaccggcactacattgtaggctgttttgtttccttcgttcatgatttcaaaaatcactttacagttttcgcccgaattgatgacgtggttgcggctgtcgtcaatgaaacgtatattccgtatcctcaagtggtcgatggccgatgcttgcggctgtcttccggattgcgggggatagggctgtgtcctttctatccggtagctgtactcctcctgcttttggggggctgtggctgcattggcaatggcagctcccgcaatggtccctatgatggtgccgatggcagaaccccggtatcctcctcgccagcctccgttactgtcacctatcagtccgccgatggcaccgcctacattacttccgatggcagctcctgcgagcactgcgttagggtcgcctgcagccatctggcttgtgccgcatccgctgaggatgatggttgctgccaggattcctataaaagactttttcatgttcatatcctataattattatgttaggcagattgttttataaaagggctattcccagtaaatcatctttttggtcatgcctccgtcaatggttatgttttcgccattgatgaagtcgttttcgtcttggcataggaatacgcacatacgggcaatatcttccggtttgccaacccgtccggaggggtgttgcgaatggtcttctgctcgtaattgttcataatcgtgtgtctgaatccagcccggagagatggagttgaccgtgatgtgccactctgcaagcgataaagccaacgcatgcgtcaatgaatagatacctcctttggaagctgcatatccttcactgcccggttcactcatcagatagcgggtagaacagagattaatgattcttccgtaggtattcgtgctgttttgacttttgcggtgtactgccaacgcatgtgaagtaatgaacaccggacgtaaattcacagacaatattttatcgaacgtctccacactcgtttctgtgatgggagagaattcactaatgccggcattgtttataatgatgtcaatatccccccattccttgaaaatattttgcaagcacagttccaatgcttctttgctgtttaggtcgacgggatagaattgtgctccggtggcttgggcggtttgctgccctttcatttcattcttgtcacaaaaggctacttggtaattaagcttgcagaaggcttctacaatggctttgccaatacccccggcacctccggtaacgaaaactttctttccgccttttttgaggggaagtgtcggcttatgtagcgtttgtaccttgccggattttttcgctttctcccaagctgctttgcgtgcctggtattgctcgtactgattttcaagataattatcggccatatatgtttccggttttattgtttaactacggcgtgtgtcacttcgtacccgatgactactgccagtccgttctgttttaggtattgtccgatggcgggtacgtaaccgcatccattcaatatgagcagggaggtggtcagtatagcaatctgtttcttcatgtcattttgactttatttggtttaatgttacaaaggtagagaaagtattgaaaaggctataggggtagcattatgttttctttccttttgtcatattatttttttcaatgtggtgattcacctctccattaatgagagttatatgatggcttttactgatttttcctactttttgtttgtggcttttcccacttttacgaaataagttacatatttctgtaattagagctgtcaaaatggctataatgatgggaactaaccactctttattattttgtatgaattctactggattgctcatatttgtatgtatttattaaagttagatatggataacggtgatgaatgagtgagtttccctatgatttttgttccaatatataatcctaagatacttaaacttaatcttgttaatgtagaactatttagtagattgaatacttgctcccagttcttatttaaattacaaaaatagtttctgacttctgtggctgtaaacggtggcatttcctttttaaactcttcaatcaaaggaataagatattcttgttctctaacttttaattttttatagaaaagatcactgtttacctctgtaaaagaaagtgtgtcttcttcgtgagacgtacaaaacatacaacttcccatatcgtttactgcattcataatttcgggatgaattgatttgaagtcctctaaaaaacgtctgtctattttttgcctgaagaataaatcatattgtttcagtaaatgattctcaaaagtatctatcggataaaaaccagaaatattcatggtagcatttctttgaattatatactcgatatcaatggtcttaatattgtaagctatgtcaacaatgggggagagttgtttgaaaaacagttccagcataaatgaaatagaaggattgaccatctgctgtctaagcatcatgaaggtaatcaaagcagatgttgatgcatttaggttaggtataagttttatcgcttcgtttaatatggctttttctgttgatatgttttgaaaatttagtctgtcaattaaaacgtctataataaactcttttgctcttttatcttctgtggaaatatattcaattagggtatcatgtaaaaaggcttgcatagataaagactggaacctttcagtcaggtgtttttgttgttcttttgctagcttttcaagaatactttttatacactcttcaatttcttgtttagcttgttctatggctgtggtagtgtatttatcaaagtctgtccgtaggatttcgaggcaagaggtctggaggtctttagagatttgcccatcaattgttagatttccattgataataactacattattagagttctcaatctttccaatgtactgtattttattgttgtctaacatattcagttgtttttgatttttttttactctattgagtcatgtggtatattcacatgcttcaccaatagacttatcttttctccgaataagttcactatattgatacaagataaccttcatctctcttccttcttttttccttgaattctctttacttgttcctctatttcctcaatcgaaggcagttgacttttaatatcttcgggaatcagcttagacagctcatactctgatatgccgataggctgatttgttgattccagtgcatattgcgccattacttggttttttgtcttgcagataagcaagccgatggtggggttatcgccaggtttacattttagatggtttacggcactgatataagtaccgagttgacctataaattcaggtttgaacttctgcacttttagctcgattacgcaataacaacgcagttccaagtggtagaaaagcaagtcgggatagattgtttcatcgcctacttccaaaggcatttgacgtcctacgaatgcaaatcctttacccaattcaagcagaaaacgagtgatattttgtgtcaaaaccttttctaactctaattcttgaaaatctttggtaatggtcaggaaatcgaagttataggggtctttgagtgtctgtagagctaggtcactttgcggttttggtagcagacgactgaaattgtttaccgctttgccttgccgctcatagagattggtatcaagaaagttgagcaaaacggcacgactccagccgttttctacagtttcattcagatagaatagagccttatccacttccttgcattgggagatgatatagagatgatgcccccaaggaatggagaaaaatttctcttcacctaatttggaaacaacttgttgccaaattgtatatggctcattataaaatagataccactgctttatactgcgtatgtttctatatgagaaccctttcatatcaggaaattctgccatcagctcacgactcaactcttcgagaaatccgcttccccaagtcatttctttctgccgttctataatttctgcccccagttgccagtaaaggtgaagcagttcgctgttcacgcgtacagccgctttaatctgtgcactacgaatgtcttgttttaggtggtttacccaatccttgaacggttgatttatagatagtgctgttttcatatttttattttcttcatcgtcatattcgatgtttctatttcacaaagttaagaaaaagaatttatttcaactgtaatcctttccgtcttttctacctctctacttttactacacaatataccatctccccctctctttcctttacctcatcccgtgttgctgcaatatcctcccgaacacgttcacccgttttgcagagaataggtatcgcactatgtcgctgtatttcctcctatattttcgcaggcgataattattccccttgtagggcttcaaaagggaatccgtctgtttccctaaggagaacggtttgtttcaatatggagaacagtttgtttcattagtaggaaacagtttgttccgttaaagaaaacagtttgttttattgagtgcgaacagtttgtttcatagtatgtgaacactttgtttcttactgttgtaacaaagtgttcaccgttgtgaactaaagtgttatctatatttttagtgataaaatgacatgaaaagggggctgaagattacctttctaccatttgtattcctcgctgtaagagccgaaagccggttctcccggaatgttgtattggtggaaagttctgcggatatagttctggtcttcgggggaaaggtaagattcttcccggtagaagcggtagtattttccgcggccgaaatgggctatcaactggcttttcagaggttggagattcttgtagggaacttcatcgagcaagtggctgattccccatgcaacatgtatcttttgtgtcgattggaaataggcgcattgactgctatcctctggaatgcacagtggattgatgatgcggatggacgggtactcgggggtatcgcgaagggcagctaagcgatgcaggcagttgtcggctttcgggcattggttgttgaaacagcgtgagtagttggcaggtgctaaaggtttttcggaagaatgtttcatgtttatatatactttgatgaagctacaaagataacactaactttttgatatagccttctgttctcttgtttgaaatgcctcttcattgaaaaaacagtagccggaaccactgaatccagtaattccggctataccgttctttcttataagcaaggatggactatttcacctggatgatgtcataattcaagtcactcaccgcctcttgcaggctgtcgttgacaaggcgcaaggtagtgtcgttcactactacgaagtacaccggagtgtcgccgtcgtctggagtcagtttaatggctgttttcttcttgttattgacgtctttctggataacttctttctttcctttggaagtaaagcttttgttctttccggggccttcggcatccaaataagttgttaccaacgtataaccgctttctccatcaggacctacgctgtccacgctcaatacatactggatgcccggaccgtcggcagcaggaagaattccctcgtatacggctacggcagacgagtcattgccggcaacagccattaccccttcgtccacggcaacagcatcattgttctgggttccttttgattggcaggataccaatgcagcggcaaaggctgcaatcatcattacttttttcattgctttaatggtttaaattaattataaagacgcaatagcgttcgttattcatcttcttctttcttgatgacaagcagtttgtccactcgtccgcggtccatatccactacttcgaagtccaggtttttgtagctgaacaagtctccggctttcggcacccgtcctatcaagaacatggcaagaccgctcaaggtggtgaagtcttcttctttcaggtcatcatagttcataatgtccattgcctccataaagtcatccagattcatggaagcctccaccagcatggaaccgtcttgacggacaacgatttcctcttcttccgtttcattctcttcgaggatgtctccgaagatactttccgtcaaatcgtgcagggtgataatcccttctgtatttccatactcgtctacaacaactccgaacttgtttttgttcttcttaaacagctctaaaactttctttgcatacaaactttccggaataaatagggcagggcgggcaatattgcgtaagttgaaggggggttcgccgcccatcatcaagatgatgtcctttacggaaaccacgccgataatctcatctttcccccgttccaccagaagatatttgctgaagtgttcttcatggatgatacgcagcacctcttccggtgtgtctgtggggtggagcacaacgatgtcgcggcgataggtcatcaggtcattcgctcttttgtccgagaagcggaacacgtcacgcaacatttctgtctcgtctttgtcgatgacgccttgttccgagctttggtggaggatcatcttcagttcgtcttgtgtcatttggcgttcctcgccgctgttcagtccgatgagtttgttcatcagtttggtggaagcgctcagcaggcatacaaacggataggagatcttggtcagcacaatcatgaaagggctgagcatggtggcccatcgttctgggttattcaaggcgatggatttgggtaccagttcacctatgatgagtgacagataggtgatgatggctactacggtaatcatggcaagagtcttggcataggcggctgctcccggaatgatggcgaacagcggttctacgtcatcagcgatggtggcaccgccataggcaccggatacgataccgataagagtaataccgatttggatggtggagaggaacttttcgggttcttccagttgtttcaatactcctttggctcttttgttcccttttccgacaagagtttcaaggcgtgctttacttgaggagactaaggcgatttcatacatggcaaaaataccgttcaggataagtaaaagtagaatgataataaattccatagtggattttgaatagtttgtgaggcaaagataatgatttttcagtatttattgttaatattgccatccgttagaaaaaataaacaataaatagatgaaaaaaagaattactgccttggggcttttgtggtgtctgtctgccgtgatgttgcaggcggcacgtgtagacacggtgctggtgagaagtgtagccatgaataaggatgtaaaagttgtgtatgtattgcctgataaggctatcggcaagcaggcttgtccggtggtttatctgttgcacggttatggcggcaatgcgcggagctggatgcagctgaagccggaattgccgcagatggcggatgagaaaggaatcatatttgtatgtccggacggcaagaacagttggtattgggacagtccggagaatcctgcctaccgttatgagacttttgtcacctcggaattggtgaagtatacagacgggaactatgctaccattcccgatagaaaggcgcgtgccatcagtggattgagtatgggcggtcacggtgctttgtggagtgctatccgccataaggatgtgttcggtgcggcgggcagtatgagtggaggagtggatatacggccgttcccccagaattgggaaatgagcaagcagttgggagagtttgctgccaacaaggcatcttgggatgcacatacggtggtcaaccagttggataagattgtaaatggagacttggcgctaatcatcgactgcggtgaggccgatttctttcttgaagtgaacaaggacctgcacaaccggctgctggcaaggaagatagaccatgactttatcacccgtcccggtggacataccggaacgtattggaacaactccatagactatcacgtccttttcttcgacaagttctttaagaagtaagtaacttgttattcgatggtatagttcacggcgcgtgtgtagtcctgctcgtagccgttccttatatgcctgacgactgcatggcaggaagtgacgataccccggttatccaacgtataagtataggtggtggtctcttcactttctccgttgctgtccgggatgagttgggtaatcaggtagtttgcaggttctcccaatatcttcccgtatatggcaaccgcatgcatggaaagcggatacatgtccgtaatgaataggcttggtatttcggagatatttgcaatttcatcgcctgagggtgtggtagccgtactgttgtgctcaaaagcatctaccttttgctgtatgcgtaatgcccggaagttgttgtagtctattgtaatggatgagtattcttttccgttgtccagcctttctgtgatgttttccagatagtatttgtcttcggtgttgatgaggtaggagaaggtgtaagtacgggtatttcctgccatatcctgactggtacaagtggtggcataacctttgtcattcagcgtgtaggttgatactgtacctgcttcgtcggttatcacggcttgatggtccttgtattcgacggtagtggtattctctatctcgaagagttcgtctcctgccgtaaagctctgtttgccggtgtagccggtcagcctgcctgcactgttgtaaaggtaggtgtgggtggcagtaaccggttgcgcatcgctctctatcacttctttgagttcgattttggagaaaggagtggtggggtaggttgacggctccggttctggcgtatcactgccattgttatcatcgctgcaagctgccagtccgccgagcaacagcaggctgagcatgattcccgaaaatcgggtgatgattgtaactcttctgtttagtttcatcctatttgtctttttatttgatacgtacggcatggcttgcccgacgttcaatggagtttgcgagagtggtcactcttaaagaacgggtatcttcttgtgcgggcggttgtatgcttccgtcgatggcgccgagtgcagtgctcaataaggcttcgttggtatctccaaagggcaggaaacgtgacatgtcgctcatctcattcactacatatcccgagtaggccggttggaatccggattcataatcagatttcccttccgaattgtatatcttgcagacgatgggattcatcgttatcatcagttcggggctggagaaattcctggaacctacattcttgcctacggtagtaccgccgatgatgacaacatccatatacgggtcgaggcagttaatcaccatttcggaggcggaggcagtctggctgctggtaagtacgtagagagtattcaggtttaggtttgctccgtttccgatgagtccggagttcagggtgaacggtactatctgcggattgaagcggttgttgaattccaggtaccccaactcttgtcccaaggcggaggaaggtgcaagcatggtacacagcaattctgcgcaactcagtaatccgccgttgttgtagcgtaagtcaaggatgaattcgttgacttgctgtgatgcgaaatattggaatgcgctgcgcaggtcgttgtcatattcattgctgttgtccgtggggccggaactgaagtggttgtagaccagataacctattttcttgctgcctgatgtatatacattcttatagtgcaccgggttgtcgttgacgggacgcgccgatgctatctgcctgggtttgtcgtaagcaacaatggcatttttctccacgtcgtaataacctactgtcagctccatggcactacttccatacagtttcttataattctgttcggtaataaagttcccgtccatcttcataatccagtcaccccgtttcagcccgatttctgaggccgggcttccgtcggcaacgtaaagaatctgtgcaacaatggcattatcttctccttctacttctatctgattggtagtgaactggaatccgtagctgtaatccgtataggggatgctgcgggtagtggtgacgctgaccagactgtcgatggtggagaatttgtcctcttcggatttgagcgaggcaaagaaagtgaaaggggcttggaaatagttcaggtcgttggtatgggggatagcgtctacccaatagtaccacacacgcatggtgtcgtcaatccagcggtctgtctgggtctgtccggcatactctttccagcggtccactccgcaggaagtcagataaatgggaagaatcagggttcccaatatgagtatcagtatattttttgctttcatgggggcaaagatagtgcaaattgagtgcagaactttcatgcttgcatgaaaaagttttgccgaaatgcagcttatcttatctaaagatagaaaatagcttgcttatctaccacaattgtggtataaaattccctaacctgtgtcattgtctgccccggcttatcgctctatctttgcaacatccgaatgaaaaacgatttatttacctaaaatacgaacgacaatggaaacaaagaaattgcactttgagactctacaacttcacgttggacaagaacaacctgacccggccactgatgcccgcgccgtacctatctatcagacaacttcgtatgtattccataattcggcccatgcggcagcccgctttggcctgcaggacccggggaatatttacgggcggttgacgaattccacacaggatgtgtttgagaaacgtgtggctgctctggaaggcggtgttgccggattggccgtagcctcgggtgcggcagccatcacttatgcctttgaaaatatcacccgtgcaggagaccatatcgtggcggctaagaccatctacggcggaacgtataatctgctggcccacacattgcctgcctatggggttaccactacttttgtagacccggaccatcctgacaatttcgagaaagcgattcaggagaataccaaggcggtattcattgaaacgctgggcaatccgaattgcaacatcattgacatcgatgccgttgctgaaatagcacaccgtcatcggattcctctgattatagataataccttcggtactccttacctgattcgtcctatagagcatggggcagacattgtagtccattcggcaacgaagtttatcggagggcatggtacgtccttgggggggattattgtagatagcggcaagttcgactgggtggcttcggggaagtttccccaactgacggaaccggacccgagttatcatggagtacgttttgtcgacgctgccagtcctgctgcctatgccatccgtatccgtgccgtattgttgcgtgataccggtgctgcaatcagtcctttcaatgcttttattctgttgcaagggcttgagacgttgtcacttcgtgtggaacgtcatgtggagaatgccttgaaagtggttgaatttctgcagaagcatcccaaagtggctgccgtgaatcacccgtctctgcccgagcatcctgaccatgcactttacgggaaatatttcccgaacggaggtggttctatttttacgtttgaggtgcggggcggtgtgaaggaagcgcagacgtttattgacagtttgcagatattttcgttacttgccaatgtggctgatgtgaaatctctggttattcatcctgccaccactacccactcccaattaagtgcacgggaattggaggaacaaggcatcaaaccaggtacggtccgtctctccatcgggacagaacatatcgatgatttgctggaggacttgtctcaggcgtttgacagaatttaaaaggataacattaaatgaatattgccgtattactgtcgggaggtgtggatagttccgttgtcgtgcatctcctttgtgaacaaggttatcgtccttctcttttttacatcaagatagggagggatgatgccgattatatggactgctctgcggaagaggatatggagatggcttctgccattgcccgtcgctatggattgtcattggaagtagtggacctgcaccgggagtattgggaccgggtggtggcttatgccattgataaaataaaacgtggcttgactcccaatccggatgtgatgtgcaacaagctgataaagttcggatgctttgagcaacgtgtgggaaaggggtttgattttacggcaactgggcactatgccactacggtgttgaaggatggaaggacatggctcggtaccgccgccgattccgtgaaagaccagaccgactttctggcacaaatagattatctgcaaatttccaaactgatgtttccattgggcgggctgatgaagcatgaggttcgtgacatagccctgcgtgccggattgcccagtgccaaacgtcgtgacagtcagggtatatgctttttggggaagattgattataatgattttgtacgtcgttttcttggcgaaagggaaggggatattgtggagttggaaacgggcaggaagttgggcaggcatcggggctattggtttcataccatcggccagcgcaaaggattgggattgagtggaggaccgtggtttgttgttcgcaaggatattgaagggaatgtgatttatgtatcacgaggataccatacggcgttgcaatacggcaatgaatttcatatgcacgatttccatttcatcacggataacccctggaaggaagcagagagaggggtggaggtgactttcaagatacgccatacgccggagttcgtcaaaggcaggctgcaaaagaaggcggggggctactgcataatatcggaagagaagctgcaaggcattgctccgggccagttcggagtggtgtatgatgccgccgcccggttgtgtatcgggagtggggagatttatatataatattccaccaagtccacgatgcctgccttcatggcatatttggtagcctcgtgcgcattgtttacacccagtttccggaagatattctttctgtggctgtttaccgtatggaagctgaggtttctttcggcggctatttctttggttgttttccccagggctatctctttcaggatgctccgttcggcagtagtcagtaaatcgtctttgatggcaggatgggtgggggaggaggaaccgttgcccgcaagtagcaggttgctgacgtgattacagatgaatcgttctttgcgtgaagcgcattgtagtgcggtcagtatctcttctttggaattatccttcagcactacgccgaatgccatgctgctgaacaatacctggcgcaggaacggtaggctcaattcgtcggaaaagagtaaccaatcggcttccttgaagcgttcgtgaagtaccattagctcttcggctcccgaaaaatcaaaaagggtatagtccagaatgacaacggcggtgggatgcaggcgtagttgctgtatcagttctgccttgttgtcggcttccagcagcagggaggtgtctttctgtctgcccaataggaacatcatgcctgctttggtgatatcttgattgtctgcaatgataaattctctcatgacatttggtatataaaaaactccgctacaaatgtacactttttagtgtgatttgcggcggagtgggaatatatatatatttatataagggttttaccaggaacgtcccttgaatatgttggattgttccagcggaaccaggttcccgctcaaagtcatggtgttggagttgaagttcgggctgatggttacagttgcgttgttcccgccattggtcagcgtaaggaatatctgggcggaaatgccgataccctggatgctgaagttgcaattcacgttgccccgtttgtcggtagtcatctggatgtctgatacagttccgtccactgttacaccgccaatgccgttaggacccgggtatgcggtgttgaaggctacctgcacggtgccgcgtccttggtttaccaatacgaagttggtgttggagtttacaaatgcggtctgtccgttgcggaacatcacctggtctgcctccattacgaactggtgagctttcaaggccgccattgcgtcatcatatgaaatggcatcctgtgcttgttcttcagctttcaggcgtgcacgttctgcgtctctctgggctttacggtctgcgcgcttttcagctctactctcttgtgcatacatggtcgttgttgccatgcttaccaatactactgctgctaatgcaataaactttttcataatcgaatttttttttgtttaggtttaaataaattgttcgttataagtttattgcaagaacaatgcctatccaggattgttcaccggttttttaattattttatatccgatagcagcaataaagatactcattaccggactgataaggttgaagaagcaatagggaaggtaggtcagtgtgggtacactcaaaatggtggcttgcgtcatgccgcaggtgttccatgggataagcggggaggtgacggtaacggcatcttctgtggtacggctaagtagccggctttcgtagcctttctttgcgtaaacgttgctgaacatgtttccggtgaggataatgctgatgtactggtctgccgtggcaaggttcaggaacaatccggaacatacggtggatgctactatgctggctgtgttcttcatgaagcggacgaatagggaagtgatgcttcccagcatgccgcttgccgtcatggctccgccaaaacacatggcgcagatgatgagccagatggtattcatcattcctgccatacctcgtgtggcaatcagttctgtcaacatgtcactgtcagtttgtagactggtactgccatagaatgtcatcattatccctttgaacatattcccaccttccgctatctcattcagtagtcccggttggaagatgaaggcgaatatccctgccagcagagtggagagaaagagtgtgatgacggaaggcactctccgggcaatcagtattcccgtaatcacgggaacagccagtaaccagggagtaatgttgaatttggcgtccaatgctgccgtaaattccgcgatctgttgtgtattgttcgtttcgtgtgtgagtcccattactgtaaagatgacaagggtgatgaggagagaggggacggtggtaatcatcatatagcggatatggctgaatagcggtgtgtccgttacggatgaggcaaggactgtggtatccgataacggtgaaattttgtctccgaaataagctcctgaaatgatggcaccggctatccatccctcttcaaaaccttgtgccttacctatgcccaaaagggcgataccgatggtggcgatagtggtccatgaacttcccgtcattactgataccaatgcacaaataatgcaggtagaagcaaggaagaaattcggatggataatttgcataccataatatataagggtaggtaccaccccacttatcatccatgtgccgctcaaagcaccgataatcaatagaataatgatagctgtggcaacacctgaaatgttgttggtgatggcaagttcataatctttccaagggatgcggtagaaagccatgccgataaagacacacatgccagtggtggcaagcagggaaatctggcttcctccactcaaggcgtcacttccgaaagtatggatggtggcgaacagcattcctatgagaaaagcgatgggaaatagagaaacgagtggagagggtattttctttgctgaattcattgggttgtttttgactatgcttggttgacaaatctattatcaatctgccgtttatagtttgatgcggcaaaggtataacaattctgtttaatatctttcttatcctctgtatgacaaataaaaattatcaaatctttgcgtttgcttggaaaaatgatagtatccttgttatttcttgctgtaaagggtgatggacaacgatattattgtcaaaataacgccggtgccgaccacgccactccatccccaagtctgccaactacttcctgcaaggaaggtacccaaagagccgccgataaagtaagtggtcatgaaaatcgtatttacccgattggaggcagatgggcagatgtcgaaaatactggtctggttgctgagttggatacattgcatgcctatgtctataagaatgacaccggtaatgatacctgcatagttgtttccgcagaaaaagagcgagccccatgcaagcagaatcattccgcaaccgataaagttgaaattgcgtatgcctatcttttttacatattttcctacaaaagatgcggttaaggctccggcaataccgcagagccctagtatgccgatgacgtcgctggatgcatggaacggggcttctcccattttgaatgcaaggcaggaccacatggcaaggaatgagccaaaggccagtcccgcacgtatcgagtagattcgtagagaggggtattctcttactaatgagaaaagagacttcatcagcccggaatatttgccttggaaagtcggttgtatgtctggtagtacctttaatacaacgatggcgcatagtaacatcattccggcggcgatgaagtacatttcacgccagccaagcacttcacccacaaatccgctgacaacacgtgatgcaagtattccagtcagtaatcctgagatgacgacacctacattccgtcccttgttttcggggcgtgagaattgcgaggcaatcggtacaaatatttggggtatcatggagcagatgccggtgatgagtgatgctgcccagatgatgtagatgttcggtgccagggcaatggctagaagggaaagtatgagtaggaagaaattcgtcaggatgatattcttgcgtctatagaggtctcctaatggaacgatgaacaataatcccagcgcatatccgatttgtgtaaccatggcaatgaggttcgttttgaattcagaaactctcaattcatgccgcatgatattaagcaggggttggttgtaatataagttggctacggacacgccagctacgatggcaagtgtccagagtatatgtgccggtaatcctccgttttctttcaagtctcgtttcatgctgcaaagataatgtctttctgtttcatgggcaagatatgtgagtatgataagaatatgtgtgaagtggtatcatctttttaatctttccgtttgttatactattattttgtttgaaaataattgattggggctatcttggataagcagaatattgtattggtacttaaaaatacgttgggtatggaaaatgaatggtttagagagttgctgggtatgaaatgcaggtggacggaatgtaggctctgctagcaaacgagggttggtaaggtgaatttgatgattcaaggaacctgccgttcctccattagaccgcctcctgatgacatacttgggattatcctgctattgactgaaaactcgggtatatattagtaggaatcattattacttaaatttataatagtatgaaacatttatcgataataataatagtagtgtcattattcattttcctgctgtccatcggcgtatatcataaggttccctggtctgttctgccaatagtggctagtggaatctgtatattatgttggcttttgttccatttgctctgtatcagtgaagaaagagatttactgaaagagggaaatcagtatttcattgatacctttcaaaacatacgtaatcccatttctttgattaagacaccgttaggggcagttacgaaggagactgtccggaagacataaagaaggaactggctgttgcacttcatcatataggcgggttggagcagcacttgatagcgttaatggagttgaaacgactatttggcaattctagtagcctggtagttgcagaacatgaaatcggcgcatttatgaggaagaaagtgtcttttttacagtctcatgtggccgggttgcagatgaagctggatttggttccggattttgactatgcaagcgcttggtttgatccgggaaagatatctccggttgaccggtttgtattgagtgccatcgagtgttctctgccggaaacgcacctctcgatgcaggttttgttgaagggggattactgggcaatcaagattaaggacacaggcaacaagcgatttttgaaatgttgcagatggtactcgtcgcggcttcctattctgcgacctctgcatggcaagtagtatggcatgggcggtgtgttttttgacaagttgatgaatatgtgtgacgggaaaatactgactttggaaaaggaggctctgtttcgatttcccataagatgttcgtgtgcggtttcggggggtgtatacattcttaaatattccggacacttttcaggtgaatgagtcggaaatggttttccatggtttctcgaagaaaaaaatatggattagacctttagtgatacttgcggataatgacaagggattcagggattatcttgagaaacgtttatcggaatgttttgtagtgaggagctttgatgacggtcaggaagcattggaggtaatatgtgaagagtatccggatttggtgatttttgaatgaagtgaagctttacattatggagaatatggataaagaggatttgacagtagatgatattgcctccaggatgtgcatgagccggataaccttttataataagtggaagttgttgatgggagaagcacccaaatatttgatttcgagaatcaggatggagaaggcacgggaacttttggaaagcggaaaattttctgtgaccgtggttgctgaaatggtgggtatgcgaaatctgaaaaacttcagtataaggagtattttggaaaaacaccgaaggagtttatgaaaaaagtatgatatttacttgaaaaaaactttcatagaaaggctgtcacatattagataatggacagcctttgttttgaaatgggagataggaaaactgaacatcctaagctagctataaaggaaaatctctcatcgttttcgctttggggataactgggtatatatgattagctttacttgctgatgcaaaatttgaaaattaaatagtcatattgttgtatgatagatagttattacataaaatacactcttttaagcaacaaacaagcaacaaaacttctctaaattgcatagatgatattttgtttctgaagatattcattgccttctcaatcttttatcaactaaagccagatattttaaccccgtttgatctattatattttcaggtttttcaattttacatgctgaatggatagcatttaggaagccggggatacctaaaacaggactggctagtaatcctattcctgcggaaatagttccacatattgttccaaaaatgatatcacctatatggctttcattcatccttgcggatagttcttctttagccattttcatatcctcaagagttattttgaataatggtgattccggagtaattgttggatttagaactaatagttctactttgttactgaatgcttttaataaatcacggtacttatctttaaattttctaagattgatcaaatctatttgtttaggatatggtatcagattcttgagtatcaaatctctcttatattgtcttgttcgtaattcaatatcttggtttcgtatgtatgttgtagcgaagctatagtcaattttgtctgtagttggctggaaatcaattttattggcaattactgaggtcaaaaaagtcataagttcattggcagttttcttttctacattataccaattgttatctatcctttctgccaatcccatttgagtgagctcatgaaaaatctcaaaatcaaacttatctacgtgtaatttattaccattttttttcaatgaaaatttctcaggatgaatatggctagtcccgaatttgttatgtgaaaatcttcgtctttgtatgatatctcggttctgagttaaatattccataaacatttttgaaacttcccaaggatgttcaagaacatccataggattaattgggtggattagttcattttgaattacctcccgcataaaaggctcatattgttctggttcatagaaatattgagtcggtactatagaactaatattgtcatagtaaagcagagctcgtatagcccaatcagtgttaggcagatttatgtatggatagtataacagattgttcatggttttcagaattatttatgtacaaatataacaaaatatgataattagtttacttttttacaatgcgattacatttgttttgttgctcaaatatttctaagtaacaaaataagattgtatattattgttgtttggcgttaattagtcgatttatacctatttatactcctggatggttttgattttaaaaggtgtaagtggtcgattgttagtgtattatgtagcttatttaccgatgcagtatgtgtacatcgttgattatcaacagtatagcgctctaaaaggtacaaccaacaggttggcaagtgtctgagaatgtgtaagttagtgatttttagcaccattataggcttgtacctccattttggaaagtaaaagtaagtgtaatttcttgaatatcaaaatgtgcggtacaaaaacttgtgaaaaatagcgttttttgatgagaaaaggtacaaaaatggctctgaaactgacgtggtaattagatccataattttattcagttttgggaatttctttacttctggaacgataattcttcaatcttacattactattcaatatacgatcaataatttataaagagattgtatctatacaaacatatttaagactttttgcatgcttacattatgtaagcgaaaaagaataaaaatgtgtggtggtatgatcgtaagtattcggccaactacaggtattaaacctttatatacaacaatagcgactgtcactatgaacctaatagtatcagccgctattgttttgttgaacccatatgttacaatttatatcagttacaagattcctccttttgccttgtcagtacacattccggatgtttcaacttccatttatgtggaagtagattcaaaagttcttcttgggttgcctttttgtgataaggcatttgtgcgataacatcgttcaggtataccctgggatttaccccgtgcgccttacatgtggccagcagagaacatatgacagacatattaaccgcagcttcgtgattaccacagaaaagaaaattttttctgctcagagtgatgggccgttggacattttccgccagattgttgtcccagtacaggcggccatcgtccagacatctcataatattatcccatttggtataggcatatgttatggccttgcctgtcaaagaacttggactgtatttaattccttctgtctccatccataccttcattgcctccatgattggcctggacagttcctgacgcgtctgtctgcgctcatcatatgacaggccggcttcgtcacactggcgttctattttatagacatgctgtatctgagtcagtgcatgttgcgccatctccctgttttcatccaaagcctgctcaaaatgacggcgtatatgcaccaggcagttgagtagccgcacgtcggggttggtcttgaaggctgtttcataacctgcaaaaccgtcacattgaagatatcccttgaagttatattgatttgccagggattcgatgaccgctccggcccgtgatcccccgtcgtaatggaagatgaccagtttctccatgactgatcttaccatccagagatattccttgtcggctctgtgtttttctctgttaatgaccggaactgtagtttcatccgcctgtacatagtcacaggagaagacttcccatttgagttcttcatacagaggcttaagcagttccacggttttcttgaaccagccgtccagtgtactttcggtaaggcctttcattccaagatggcggtattgctgtatctgacggtagaacgggacatgatattcatacttctgaagcagtatctcggtaagcaggctggtgtcagcaatgcacttgtcgaccggcatcagcggcatgggagctatctctacgcctttctgtccggctggaggaagcagggtactatccttgagagcatatttgggacggatgatcaccttgacgtaaagcattcccggcttgtgtttgacgacttttgttatctcttcgcctattctacggtataaagacaagtctacgcctttcggttctattgtatcggtttccaatacgggcaagtcctctatcattttgcggttctgacgatttcgttttacgtcttccaccgattccttctcaatcttttccacagcctcgtcccgcttttcttccgcctgctgccggagtccggaaaactcgtcggcaaagaggtctggcatattaggatcatatacgcgaagtttctctgatttacgaccaaagagctgacggttcagccatgcgacctgagccgtcaactccttgatacgttcctgcagattttttatctgttcggattgattcttattagtagtagacaatgaggctatagaggcattcagcccttctatcgtcttgagtaaaatttctttttcttccattgtctatacttcttttaatgatgtaaatatactaattaacagtgaattatgcaacaatatccaaagtttactcacgcaaaaaacatgttatacatggtattccttacgttcggctcttaaccgccggagcctctgttccgggttttcctgtattccttcaaccatcatcaccagatcgcgccactccatgggatagctgtttgatttgggatcatactccggcagcttgaagcgaccggcctccaaacgttttacatacattaccatacctccgtcttcggcatgaaggagtttcattagtctgcggctggaaccgatgaagatgaagacatcaccgttcctcacttcactgttcattttctcatgtaccactccgcatagcgaactgatacccttgcgcatatctgtcctgccaggacacaggaagtagcgcatcgtgtcgttcaggttaaacatgaccgtctcgaagactttgggtaaatatttccttcagcaaatcttcagaaccgctcccgaagtgggcacgaagtccattgggaaacagcagcgcaacaccatgcggcaattgttcttcttgggaagactccgtaaatgcctgtttaaaactgataggagccaactcgtgtttgatactgctcctgtcaacggaacattttctacgccagtagtgataggttgaataacttacacctatctgttgaaggtacgacttcaacggcagctcgctttgttgcacctgcaattctaattcttcaaattcttgtctgttcataataattgaggtttgattgtattcactgccgcaaagctacaaccaaacctcaaagtgtaaaaggtgcatttcttcgaatgcttacgtatgatcgaggacccattgcattccgcccaccaataatacaaagattctgaattctatgcagactaaactgacacatactttggccgatatgaaagaaattacagtcatcagattacagccattcaaaattactccatcaactcatacagaaaaatacgttgaacgaagcgggaagatatggtagcaggagagtatctgtaacccagtaataataatatgttatgctctacaataagtagtttttacaatcattgtggagcttctataacacccatcttagagcatcctattccttattcaatataatctatagtttgttttctaaaattctaaatatttatttctgaactcaatgacacttacgagttttacgtttaattcttctctcgaagcaatcatacaacagttggtaatggaattctcagttttctgaaatttctaaaatacttcataggacttgcttgattccacagagatgtatttgttgtcagaaactcgttcatagaatccatctcttgcagttcttgaagtatattatcatcgttccttatcagatcggtaaaggcattttgcggatagataatcaggcatctgacctccttattcgatacaataaagtctgaaccaaaatttttcaaaatagaaagatctctgctataaccactgatttctctaatatctggtactatcccggtataagacatttcatacttgggtttatatttcgcatcaataatcaaccgttctccgatatggataaggtcaacagctgtctttcgataaccaggtacttgaaaacggatattatcttggtatgcgtgatacaacttactgtatacgtacaattcaaacaaccttgacatgtctatccaaaaacatggagtaaaatgattcttcttactgatattagacaaagagtagtcgtatctgtgaagtatatctttcgccactttgattgcttgttcatagtacctaaatagcttgcttcctccacaatatttaacggcagaaacttctatattgtcggatacattaacgaaggcagtcattattttattgatgcgagcttgcaattcacccgtacgtttgtttgagggcaacagtttcaagagcatagcttgggcaaacaatagtgcacgttttaataaccgattggccggaatatctgtggtgtaaacctgatacgtgcatacatttcgattttttctttgatatataatattcttctttatttgctgcgaaatgacaaggctacctttgactttgttcttcagattctttgttattatcacataatcccttttgagtccatatctgactagttgctccattaaagtcacgtaatgtaccagaagcaatggtgtaagttggctgagattctctgtagtctcaataggcgacttgtcaaagtcaatgccataacattttgaaaaatatccctctccatgttttgaatccactgaaagcgcagccatgaacatctccaaatagtctatattgggaatcttaggaagaactatcacaggaagttcccgttcaaccagccacgtggcaccaatgtaatagcttgccgtaagagtagaatcgatagcaaggcattgaggtgtccccatataatcagcagggattcccggtaattccacattgtgtgccgtaagaaaagaatatatatcaaaatcctccgaaggaacataggtttggtgctcggtgataactattggggtcctcaacataattaataatctgtattatatttctctataaatttctgcatatacagacttttttcttctttgccatctgattttttgcgaatgtcttcaagcggacttttgcagcaaataccatccttataatattcgttcagtagaggtagtatctcaaatttccaccgctgttccagactttcttcttccttgtacataaagtagctatgacctaccatcaaatcttcataatccatatccacagcactttgtttaatatagttctgaacggcaagatatagtttcttcgcttcgtccttttgggcatcatcagaatagctattttccgcaacttcccacaaagattcaagcgcgcagaaagcaaaacgcctgcgaatggcatagtcaatgtttccgacgcttcggtctgtagtattcattgttccaataatatacaaattatcaggaactgagaaatccattttagaataagatagcttagcagaaatgcaatttgtctttccttctcttttgtctgattcgatcaaagtgatgagttctccaaatatctttgatatatttcctcgattaatttcatcaataataagtacataattcttatccttacatagcactggagatttcagcccaaaatcagcatatagtttgtttacaacccccttattataccctacccaatatttgggaccatgcccaaaatattcaaggcgaatattttcttttgtaaggactccgttcatttttttctctttgccagtataaagtgtaagattttgctttgaatttactgctacatgaaaaatagcaccaccagaactttttatagggtaaaaatcagtattctgaatttcagccaataacttatcgtaacattcatcaaaatttgagtcgcctttgatacttgcatcttggcaaattttcttaaatatgccatcctcaatatcgtatgtgacttgcccattctccaattgcggctttaagccttcaataaaatcatcataatccattgtttgatgaaaagtagagaatgctatctgccccttttgactcaagtcattatatatttttatcatatcttcacgacttaatgacaaagtgtttactccacaaatattaagtgcgatttcgatagtactatacgtcttgcccgttcctggagctccttgaagaataatgttcttctttgtcttcaaaacatctatgatggcatataaattctccttcgatatcatagcgtcaacttttaatttaatatatttacaaatttcatagtcagcttcattatctttttttaattcataaatagctggtatcctagccgaactgccaaatgcattgttgtttccaaactcaattttctcctttcctaaatccacaaatccggttaactttctagtataaggccagtcatgtgagttttcagaagaaaccattcctgcaaaaaagatctgcttatttttgttcgctccacgggcacaaataacatagtctccaatttgcatttcatcaaacatcttacctttgtgctcttgaggcgaccatcccatcattatagtatgtgtctgaaacatttgttccagataatcttgtatatttccatcgttttcgacattcggactgattacataatatctgctcattgcataatatgtttattgtttgaaaggtgtaacttatatgttatcaagtatcatataacatataagttggtgattttagcaccattttcgacttgtatctccattttggaaagtaaaagtaagtgtaatttgcagaatatcaaaatgtacggtacaaatacttacgaaaaatgtcgattataggtgataaaagctataaaaatagctctgaaataaatttggaagtttctgttatcccataaagtactctgtcttcaaccaattagcataaatcgagtcctggaatgagattgcatcagccttattatccaatatatcattcttgataagggtagcctttgaacgggatattgaggtcactgaaaagatttgatagcgatgcatcacttcagtcgaagtgatggccttttctccggttataagagccttgaggtagttcaagttgctgtgtgttcagtgtttcggtgatggttaaaaacaacagacttatgtgacagcagtcgctatttttaagattgccaaagtagtaatattctgaacagaaaaggaagtattatttctttttctgttcaaattattgctatattttgcactatgaatagacaattaagtgaaatagaaatcaatcatagaattgttatattcggaacttaagtctgctgataagaaagtaatattaaaatacagatttaatatattttatcaattccatattgttgcaattgggaatttctaaacttttacctcctttaaatccatgttgcaataaatcggattctgtcaatcgagaacgatttgattctgcaagcaattccagtttataagtctgtttgaattcaggttgcattgtctgtttgaattcaggagttttatcatcaggagccttttctatccaaaattctttatcctcacgtttgcagttctctgctgttacaatcattttgaaacggacataacgttcatcggacataaacagatatacgatatcgcctatggcgaaacgagctctccccattctccaagaaataaaccctaaggtatttattgcatcagcatgcctacatcttttcttattggcgaaggcaatccaagtacggttacatttattcatagttttattattttgcgaaatattcagtcttcaaccaataggcataaatcgggtcttggaacgagatttcaccggctttattatccaatatatcattcttgataagggtagcctttgagcgggatattgaggtcgttgaagagatttgatagcgatgcattacttcggtcgaactgatggccttttctccagctataagagctttgaggtagttcagttgctgggtggtcagtgtttcggtaattgttacaaacaacagacttaactgttccaccaacgctgtgtgtgcctcacgtacgatttcaacggtacatacatcctttgttctgagccatgaaagctgtgccaactgctgtgcgtaatatggatggttatctacgagttttgcaatcaaatggcttgcttcatcgtcgatgttcttgccagtatcagcgaaacgactcttgaaaaactccacgaggcaaggcgtctcaatcttattgagaaacatcaggttgccgaacttgtagaatggtttggatgagtcggtaaacacttccatcatcatgtggcgcttgctgccatagagacaataggccacactctggtgcagctgccaatgtgaacgcaattttttctggaaatagtctgggtctgtaaattccgcgatattttggaactcatctacgcaaattacgattttcaggcctttcttcttggcaatcttttcggcaagatcgagcacttcatcaggattgcgttttacctcctcccaatcaaagtcgattgagacctcattggtggagtctgtaccgattgaaatcttgggaacaagatgcgaaaagaagctcttcgcactctcgattgcttcctcccattttgtggaagtggcggcaattaccttttgagcgagcagcgaatagaaatgctcttcgctacgcacattgaaaaggtcgatatgacagattcggaggttgctgtcttgcgccatcgctaactttgctgccttatttacaagcgaacttttaccccagcgacgaggagaaataataatcgtgttgattaacgacataaagttctgaaccaagtcggctgtttctttctcacggtcagtaaaattcttctcggtagcaatctttccaaatataaacggagtttccataacgctctatttttgattttcaccacaaatataatacataaaatgtaactacaaaaaatgttgcaacaaaaagtgtatatacatttattgtagtattttattgatttgtgtcttctttgtataaatatcagggtaaaagttgtacaatcataatgagtttcgctttccagtaagaaacaatatattgtttgttatatgtgaaatacgaactctacgaataatataatagcatttaatgtcttaacgtccaatgatgtaatcaagcagattacggtaagagtaaattcgaaaatttattcctgtaacacatcataaaataaagtaaaatcactatatttacatattatatgatatattgagctatgacaaaaagtacgatgggtaccaagttaccaagaaaattggagcagaaaatgcaaattgtgggtgaacagatcaggctggccagattgcgcagaaatcttagtattgctcaggttgccgaacgtgccacctgttcacctcttacggtttcgcgcatagagaaaggtgtacctacagtggcaataggcatttatcttagggtgctttatgcacttcaaatggatgatgacattcttctgcttgcaaaagaagatacaatgggaaaggccttgcaggatttgagccttaagaaacgagaaagggcttccaagaaagcataagaaaaaactctatgtatctgctgattttgattgacttaaagagcccaaactgattggagagctaagttacgagtctcattgtagctctgacagctatggattctttcaaatgttcttctcatactttttcagacagatgggaacatactttgataaaacgctgagaacagattttggcaaaggaagagagaatctggtacatcgactttcttcattttatcatcatatggggattgatgacttttgtattgataatgttattgtggtgtattttgatagttaattttagtgctgtatggtatatttttcagatatatttaatgtagacgagtctattttagagtcatatggggcaatgaatatatcattgcttaacgatattcctctttttattgacccatttttattatacgcaagtgaaaagccagaatacaggcaattgcatgaaaatatattggattatctttcttttttgagagataaggcaagtggatttatctcatctgaaaagattaaacgatggtatacttttcctgaggtcaagcaaaattggctcggatatagtgaatcaggaaatggaggtttaggcttaggaaaggattttggacaatctatgtcaaaggctattcaaggcgtttttccggatctaaaaaatgagaagattacagaaacgtctcatttagagaaattatcgttgtttaaagtaggtgtaggtcgagataatataagtgattttacttgcaatttaataaaaaaatatttgcttgaatatacgcaaacttttgcaatgcaatatctatctctagaacaatgtaaaaatattgcagtttccaaggtctattttgattataaatatgaaaattggatgtcccaaaaatatatcttgccatattttaatggtgactatgtaatattaacgcctaaagatcttcttactaaagatgaaacatggattaatgctagtgaaatgcgacatcgtttattagacattacaagcagtttgccaaatgatgaattaagagatcaaattaatgatatttacttaaaacagttaacaaagaaaaagattacgaacaaattaatgaatgaagcggctgcaactacaatcgcacgattccctatattaatagattactatataaaaattaaggaggaagaaaaagagaatgcaaaaaatgtatcgaaggaggtagtcttatctgtagatgaagtatttataagaaatgtacaaaccttgatacaaatcttaaaggttaatactcaattctatgatgagagtgcaattggatcttatgatgcatcaagagcgcgagtgatgtatctgaaagattttatagagaataaagatggatataaattattctatcataagggtaaacctatcaaaagagaaaaagatcttcaactgctttttaagcttacatggtttgcgacaatatttgatgtaaatgctgaagttaataacggtagaggacctgtcgactttaaaatctctaagggagatttagataaaaccctagtagaatttaaacttgcaagtaattctaaattaaaacaaaatatcgccaaccaagttcaagtatatgaagctgcaaataatacgaatcagagtatgaaagttattctttattttaatgaaatagaatataaaaaagttctaaatgttttggatgaactaggcctttcgagtgatgaaaatattattctcattgatgcctgcaataataagatatcagcatcgaacgtataatatctcacatagctatttcaacggtagtgtaaactaaactgtgtcaagttatattttggagctgttttgggaccttcaatattccaaaacggctccgttagttatcaatatcgtcaaagaactccaaacaaaagatgttgtcaggctatgagtaagtattcggccaactacaggtattaaacctttatatacaacaatagcgactgtcactatgaacctaatagtatcagccgctattgttttgttgaacccatatgttacaatttatatcagttacaagattcctccttttgccttgtcagtacacattccggatgtttcaacttccatttatgtggaagtagattcaaaagttcttcttgggttgcctttttgtgataaggcatttgtgcgataacatcgttcaggtataccctgggatttaccccgtgcgccttacatgtggccagcagagaacatatgacagacatattaaccgcagcttcgtgattaccacagaaaagaaaattttttctgctcagagtgatgggccgttggacattttccgccagattgttgtcccagtacaggcggccatcgtccagacatctcataatattatcccatttggtataggcatatgttatggccttgcctgtcaaagaacttggactgtatttaattccttctgtctccatccataccttcattgcctccatgattggcctggacagttcctgacgcgtctgtctgcgctcatcatatgacaggccggcttcgtcacactggcgttctattttatagacatgctgtatctgagtcagtgcatgttgcgccatctccctgttttcatccaaagcctgctcaaaatgacggcgtatatgcaccaggcagttgagtagccgcacgtcggggttggtcttgaaggctgtttcataacctgcaaaaccgtcacattgaagatatcccttgaagttatattgatttgccagggattcgatgaccgctccggcccgtgatcccccgtcgtaatggaagatgaccagtttctccatgactgatcttaccatccagagatattccttgtcggctctgtgtttttctctgttaatgaccggaactgtagtttcatccgcctgtacatagtcacaggagaagacttcccatttgagttcttcatacagaggcttaagcagttccacggttttcttgaaccagccgtccagtgtactttcggtaaggcctttcattccaagatggcggtattgctgtatctgacggtagaacgggacatgatattcatacttctgaagcagtatctcggtaagcaggctggtgtcagcaatgcacttgtcgaccggcatcagcggcatgggagctatctctacgcctttctgtccggctggaggaagcagggtactatccttgagagcatatttgggacggatgatcaccttgacgtaaagcattcccggcttgtgtttgacgacttttgttatctcttcgcctattctacggtataaagacaagtctacgcctttcggttctattgtatcggtttccaatacgggcaagtcctctatcattttgcggttctgacgatttcgttttacgtcttccaccgattccttctcaatcttttccacagcctcgtcccgcttttcttccgcctgctgccggagtccggaaaactcgtcggcaaagaggtctggcatattaggatcatatacgcgaagtttctctgatttacgaccaaagagctgacggttcagccatgcgacctgagccgtcaactccttgatacgttcctgcagattttttatctgttcggattgattcttattagtagtagacaatgaggctatagaggcattcagcccttctatcgtcttgagtaaaatttctttttcttccattgtctatacttcttttaatgatgtaaatatactaattaacagtgaattatgcaacaatatccaaagtttactcacgcaaaaaacatgttatacatggtattccttacgttcggctcttaaccgccggagcctctgttccgggttttcctgtattccttcaaccatcatcaccagatcgcgccactccatgggatagctgtttgatttgggatcatactccggcagcttgaagcgaccggcctccaaacgttttacatacattaccatacctccgtcttcggcatgaaggagtttcattagtctgcggctggaaccgatgaagatgaagacatcaccgttcctcacttcactgttcattttctcatgtaccactccgcatagcgaactgatacccttgcgcatatctgtcctgccaggacacaggaagtagcgcatcgtgtcgttcaggttaaacatgaccgtctcgaagactttgggtaaatatttccttcagcaaatcttcagaaccgctcccgaagtgggcacgaagtccattgggaaacagcagcgcaacaccatgcggcaattgttcttcttgggaagactccgtaaatgcctgtttaaaactgataggagccaactcgtgtttgatactgctcctgtcaacggaacattttctacgccagtagtgataggttgaataacttacacctatctgttgaaggtacgacttcaacggcagctcgctttgttgcacctgcaattctaattcttcaaattcttgtctgttcataataattgaggtttgattgtattcactgccgcaaagctacaaccaaacctcaaagtgtaaaaggtgcatttcttcgaatgcttacggctatgatcctgaacctgttcgggaacaggatagccagttgctaggccgtctgcccccagttctgcaccggctgggtccacttcttccggattctcgtaaatgcaagatatacaagtttttccagtgcgatatcagatgtaaacacgcccttgttcttggttaccttacggaactggcgttgatagccttccacggaattttgtgcttttgccgatggcgtacaagtctatgattctgtccgcaagtgaatccgcaaggatcttttcacgtttgcgtacaacttggggattgaaagtaccgtcccggtcgcgcggtgtgtttatggtcacttctcccatcgaggtctgtacatgcttgctcatgtggccgtggcggcggttactcaattcgcattcacctccttccaaatggctgtccatttctccctctagggcactgttgagcagattctccaacagcggtaccaatactccatccttgccggaaagagggacaccggccttcaattgttcaatggcattcgctttgaactgttcaaaatcaaatgaattactcataattaaaatgtgtctgtaaagttaataatttctttttcctttacttgatacaccttaatttacagtctcatttcatcttagctgtcttaaaaaatcagttagagaaatagttgtaatacctaaaccctttgcacgtgtctgaagtatattgtcagaggtaagtattatcggattttctcctttgtattttaatgccaccgataaaatctgacaatcaggattattcttgtcaaatccaacaggtaataggctaatgtcggcatcctccattttggagaattgtttggtaaaagcaagattgatattccttgcagcagtattgagagcattcttgtcaatgttattttttaatttgagtttatctagttcttccaatactttggcagggattatcactttgtatttgtgcccaattctatcaataatgttagggcaattaacaaatacatttgtgtcaattatataaatgttttcctttccttcaactatttctttacgttttttctcgaacttggaaaggtctattttacctaacacatttactgatacatttcctgcagttatattcttggtgctattgaatgctacaaatttgtcatcttgactttttaaaagatatttccgaacttcttcttccatatctttacccattaaggacttgtcagcaacgattattgtgcaatatttagcacgtgatgtagcgacattaaacaactctttctccaaagaatattttagcgatgcatttggtataaagaagatacaataatctacggtaaggccttgaactctatcaactgtttcaatctttacattttcaggaatctcactttttttcgattgaagaatgaattgtttttgaatttgtcgtacagtcggcctgaacttggaaagtacggcaatcttggcatctttgtcctcagacaaaatttcctcaaccaaatctataattgaacttatagctaaggttggagtcttatcaccgggttccagatccatccccaaaaatgttggccctccatttttattcaaacaatcgatggaggattttattgtttggactttcgaaacagaattgagatcattattgtaaaagatgccagtacatgcagcacctctttctgttagacggaaagtgtcttttaacatatatgacggatatgagaaatttgtacacaacgtgttgaatcccttcacaattccaccccagtcgtatcgattaataacatcatcacctgttaagacaattggtggcaattggttctgatcgccaatccagattatcttatttccaagcttcacagaggctgctatcatcggatataatgcttggctcgcctcgtccattataacatagtcaaaaggtatttctattgcatcttttgcccatgcgctggaaagataaaatgtcgccagagagagataaccaggtgctgcattacatagattttttttgttaggctgtagttttggcagttctttgctttcatcaacagtcaaacttgttttggtaaccttttgagcatcaagaaagtcctttaggtcttttttcttaactagttctattagggcttgattggttaacgctgttactaacacacttttcccctgtcttagtaattccgcagataacgctgccattctataagttttaccagttcctggagggccttgaattgctatacaattatttacttgtaacttttgagcaagtaaagtattcaaatcttctttagattcaactttcgttggattccagttgttactttctgatggttcataatcaagaatttgtttagtaacagcacaattagtgtccctaacaatagcaataaggttcatcaagtattccaaaggtggatcgcttggtccgaatgcgataattggtctttccttctctagtatttgggcaaattccacacttatattcttaataccaactaaacagaagtttgaatcttcacttttagacagccaagcgcaaagtgcctcagaacaatcacgctgatattgctttcttagttctgcccatgacaactctccccagttcttgtaacttcccatttcattgatgaaatatgaagcagtccagaaggtgttctttcttggcatattgtcgtttactctaaccttaaaaactaccattccgttttcttgaagtttaataaaccgaccgacgaacacatcaccacgctcttttagaacaatggctttggtctcaaccaaacgagcgtactccctcatctgagtctctaactctgtactaaggaaagtttcgtaatcttttcgtgtatacctcatattttacaaatcattatcgtcaaacaattcttggatgccttctgtctttgcatccataccgaaaccttgtacttgtgagtatgtgttacgctttggatcctttacagcaaaagtcgtcctctttacatattggaatactttgctgagggctgcataatagtgtttgggagtgtactctgtgtcaaagatcaaattaacattagaatcttttgtaaagagatcctctccagaaacactgtgtacatcatcaccatcccataccagaagtaggtttttgctatcttgcgttaagaactcgaagtctgttgcgctaagatatatgtaaccgcctttagcacttttaaccacgacattaacaggaactccatcaggatctttgatttttccttctatttgattgtatgaatgccacttgccatcattaacttcgttatcaagaatccaaccactgcaatcataaccggatttaactaacttttcacggacaacttcttcggcttctttatgagctgaagcttgttctttttgtgaaaggtcagggcgttcaatcacatcttttttaagattttcgtcctttgatacaggtttggtggaattctcagaatctttattgtccaaatccccatatttctcccgatatcgctctaattgttttttgaggacatctatttctttttgcctactttcgacttcgtcttttgttacgagattgtcataaaaaagctgctgccaatcagaagaactaaaaggaatatttttatcagaggctatggaatacaaaatgtctcgaacctcgcatgatctattgatgaatagcatgtttgagggtgaataatagaaatagtccccttcattgaatttgcaaagaagcaaattgtccaaattagtcttaattagtttgcgaggcatttctcctgcatacaagtatatagaaatagttttgtcatttttccatgtaacatactcttttaggtcatattctacagagtttgataacagttcattactatcaatatctgtacgtatatatttattgaaaagttccatcatcttcattgtttgaatttgattggcccctgtaaatggaagaactgccatgttcttaaatagttcgatggtggacggtatgctatctttttgggcttcaacatcagaagagctaatttcagtatcttcaattatattttttcgaaactgtataagcttagaacggtctgtttttacaccaaggctaataagataagaacgcttatcatcatcgattgcccagctttcaataaatggtaaaacttgctctttaggaagtacatacttactattgaaataagtagagaaatacggggataaacgatagccgaaagaatcgttatacaactcgattttttggctatatagtatatccaataatttatgtatccaagattcttgaacagtagttaaatctatggaaggaacatatccattataatgattatagacctttcttgctcgataaatggcaaatagataagacaaaggtgtataaccgtttgtgttgtttattttattagcaatgtctcctgtactcattggcgatataactaatagacgtgataactgagtttcaggaaaaatagctaaactttgtttaatttgacctataactccagtatctttatactcaggcagtaattctgacaaagatatatgcataattttaccttcatgatattctatgttaacgtcatcacttacagtgaaagatgatagagtgcgttcacctacaaaaataagtgaggcaaattttcgaagttgctcatcgctaagaacatcaaatgctaatgtcagaattctacttatataatcttccttttgataagacttatttacatcaagtgtaaggcgatctatttttgagaggaaatattgcttagattctgtgtcttgttgctcaaccatttccaatgttgattcatttgtgcctttgctattaattacattttttgtaaagtaaagagtccaagaatccttaaattgtagatacacatcttttaatgacacagttttaagtatatcattaaagttttcatctttctttattatctcattgaaaacattttcctttttaacaagatatttttgtatttccgggaaattctcttcttcacgtatttcatactcttccatccactttggataattggcatcgtatgtggtcattatgttcaaccatttgcgatgagtcctggactgattaccgaaaagaaatgtttggacaggtttcgcctcgcctattccttcgatgttttttatcgcattgaataacgataatttctctaaaggtgttaaagtatcagaagtaataccctttattttgtctctgattgattcaaagacagcattgctttttggagttactatatacttcttaaatattgaattactaatattattggaacatttaaagcctatttttgttaaaatgtcgcgaacttgatccaagttgtcatctatgattattctgcttgggtctgcatcaacttgtgccccattataattaccatcgacaaaatggaacaatggcattgaagtcacaaatttttcaaactttgtctttaattcaggcttatattggctatcaagccagtttaccaaaactttgtgtgaatccgtatcgtttgaatttaaccattcggaaaatttctcactgtctaacagagctttaaaaattgcatcaaaagttcctggtattatattgttagagaagaatgacttaattggcaatttgtcaagattgtcagagcatgcatatccacatacttcaaagattggacgtaattcttccataccagcacgcattacaatcttactcaagtcagatatagtctctcctttactgaagaacatgtcaccaaacttataaattggtagattatcaacaagtgacattatatttgctcttcgcctatcgcaatctttagatataagccaattgtaaaaatcatttctattctcatcatcagttgatttaaaccattcgacaaaccttgtatttccgatcattttgggaatcacagtatccgatgtaaccttctcaactttctcaaatatcttattgttaaatacagatttgtcgatgctgtcagatggaagatgcttatctgaacctaatatgttaaggaataattctgaaccgattatctttgaaagtccagtcttatcaataacaatctcttcctgctttacggcttcttcgtcggaaactctaatgaaagatttattctctagtgcttcggtgaatgctttattgaagaagggtgataacgatagtgttcccatttcttcctcattcaacaaattacttggaagtaattcaagataggaaggaataactgttgacaaagaagcaacccagtcaattaataattttccaatctcagagaaaagaaattgattccatatctttttcacatgaagctgctctctatttgcagccaataagaaatctgcattgacgatgaagttgaagccaaaatcgttaactgaagttggcagataggcgtaaagaacggaattatccaatttcacgattttcccatcttctacttttgcggcaaagcttatttgtgtcatagtagcttttttcaacttctcaggtacattacggtcatcttgcaatgcatctctgatttcttggggtatagttattggatagtctttcacgacccatgaactatcaacaataccatctttttctatccttaaaatatccccatcatgtgactttgatattttagtccgaagttcaccttcatcaaattccaaattcgtcacattttttaagaaaagaagaaagataggatgagcgaaaattcttgctatggacatacgataatcattaagattatcttcttctacctcaagagatattcctacacgttctttccagaatgtctcgttctcttttacttcctttgggtatctatatctttcctgccaaataggttttagttgccatgggatattattcatgtctgaatccccataaacaggagaatacttatcaaaagcgaaagaatagttgccggagtttatgatgacagtatctgagccagtgaatactgatttaaagccaatacccttataacctattttttctttgtcctttctttttgtactatctccaatgctacatatgctatcaacgtcatcggtgtcaaagactctgccattgtgcataaataggaggtgttctttaagtaattgtaatatcacagatacagactgaccctcttcgggctggtcatctgcgttctgtaataactcatacacaaatcgatcatctgcgtttgaatacaagtcatccataatattatgaagagcattaacggtattctttgcatcacgttcggtgaatcctgtatctttgaatattttacggatttgagcttcacgagatagtttgtctttgagatttgtccccagaagaccaaacttagtatctgctaatgttattataaagggattcttatccctaaatttcttgggggacaacttaacgctaattcgccagatatcttgtttttcaagtttatcattgcatgcagtccagagttttaccttacccaacccaaatggataatacaaaatatcgccttcggtattgcgaatgtcttcaaaataagcaaaatcatttccttttttatctttatgatctgcctttttatatgttccaaccattgtaaatacacccttgacatctggcgtaatattccaataactggataagaattccaatacttcgctatctgaacgagtcttgaattcaactatctgttcttcaaaccatttatttctcataacaaagcatttttagtttattgtcaaattcaaatttattccatgcctccataaccaagcgtttggtacggtactcgcccagttctcggagttctcgctctttgagcacgcggaatgtttcgttgatacagcctttgccacacacatcttcaggatcaagaatatagcgaaggtcctcagtggtaagaccatataaatgagcaaagatggcatccagttcggcttgccacacagttcgttgctcttcattccatatgactggttcttcaggtaggtcatactcttctgggcactcttctcgcaactcttccatccaaccatccaagtcatgattgaaccagcaaaggcgtgctacacgctccacaattccctgttcgtaacccgatgaggaaacctgttctggagtaaggacagggaattgtttcacaaaactgatactggcatgacttcctccaattttttgtcttgttgtataatcaaatactaatgaggacatcattcccaaaagcagtgctccgggcatagtgccacgctccacgaagaggagcgtggcactattcccgacgccgaaggcgtcgggaataggcgacactataaacgtcctttcatcaacagctcttgctatatctcgaaatccaataagccatttatgtttccattcccaaataatattatctttagcatctatctttacaagtcgattatagacttcctcttgtggtacccaataccaaggcataggagtgtcataaggatttgctaattgctctaaagttggtgtcggtactgtattagggcgttctcctttggtgggccaatcagcatagtgatgattataatgccaaatcattttcccttcatatagtggaacataaatctgattatttaaaagaaatttattcccatttagttctgctccttcattgataagttgagagtaggtacggaaaagataagaagccgtggacatattaaacatactgccaaacttgatatcccaaggattctcactcgttgtatcgtttattatcactttacaacggcgataaatcttagtagtaagcattgcatcgcgactagttcgaaatatcgggcatgttttggtgtttggatttaaaagttcaaaatctgttgttttaagtttatagattcttgcaggatcgagaagatgatccatacgggttaggtaaaacccgcccgaaacttcacgaggagtatcatgtttttgaccgacggagaggagacagaatttaaacatccggtgaatgtcaaataagccttctttattctcaaaatcataaagagatattaacctgttttcttcaataagtttggagaaaaatgttttgctactatcatttaccgcaataccggtaggtagtactaatccccaggcttcttttgaacaatttaagcaatgctcagcaaagagcggatataaatcaatttttcctatagctgtgaggggaaaacgcccagagttttttacataattagattgactcgatacagtctcacgagcagtcttatattcattatataaggctggattattttctttaagttgagcaatttttttatctcgagcagcttggtttgcagcgtggacaatggaatcatctttgtcaacgaaccatttttcatcttccatttgaagtttgtcccaaggtggattgccacacatcacatcaaatccgcctccatcagcaaagacctctggaaactcgacacaccagtggaagaaacgattggcctgtgccacttcgttcacttcttgtttgaatgaatcaggaagaacctgtaaaccttccatctcctcagttgaataatcaagatactttatctcctgtaaagcattatagactgtacgggtatagggaatattgaatggggtaaatgtctcggtttcatcatcaaattctgaagccaaatctgttgcatggaattgtttgtagaaactataaacatatatatcacaagctcgtcgtagacattctacacgaggagattgcattaattcctcccattttgattgcttggtaagctcttgtaagagtgagtcttcaggtaaatcattaatttctttaaccttaccggccagtccgatctgttcactatcaatgctttgaatggcaatatcctgactaaacaaggttacagataagcctatatttctcccactacgaactaagtcgacatctttaagggcctgtttgttgagctcaataattcttttcttggtttctttattatcagcagtgaacgcttctttgggaactccatcaaggagtacatcaaggttggtcactccaaccacagagttaccgcaacgaatatgatggtcaaggaaagatagtggtttcccagcacaataaccttcaatccaaagcacgactttacaaagttctacagcatcgggattatagtctactgcatagatgcacttctgaattacttcacgaagcgcttcacgatagtcgagcgaagctggattgtcttcaccagtacgtaatgtacatatataccaggctaaagttcgagccatagccaaaataatatgacctgaaccactggcggcgtcacatactttcatggagagtagtgaacgaattttttcttcagtggtctgacatttggcaatacgctctttaattaccggctccaaggttgtacgaataagactttgcacgaggtctggacgggtatagtaggaactagatgatttccgatcaaggcctgcgccaaaagtaaaattccactctgagacggatgttccctgcataatgatagcacgcatttcaagaataccctcatatactgacccaaactcttctacatcaagagatgaataattaatctttacccgattttgtttctcgtccctaaactcatttagacaagagaaagcagccagaagctgttcattagtaatctggcattgacgtaaataatgcaatgtctcagaagcgaataatacgcctccaagaggcttgataaagagtggagctccaaatgtttcatcttcaaaaagtcggaaagaatccattagcccttcccataagtcacagtagcgttcattgcgcaaatagggtaactctgacaagccacgtaagcgagacactgcataatattttttgtaaatgtcctggcaacgaactttttgatcataatcattatctgtatccggagcaccgatattgtataccagattgcggtcttcaataataaagagaaataataatcggtaaataaaatgaatcagttctttattcaaagtctgtgcgtttgcttcaccattgatgacagcctgtctgaatacttcattacctgcaccttttccacataccactgagcgtcccagtatttccattgctttttgaacggcatcacttaaccctgcacgaatgcggttaccgctttcaatagagcgattgaaccattgttccatgatacaggcatcgtccccgctgtgtgtgaaacgggaagaatgcatcagtcggaacaacaagcagaattcagcataatgatcttcttcgaccatacgacgtatgtcgaactcaatgtatgtaagtttgactaattgtccggtgttacgaataaggcgtaatacttgaccattagttacaatgccatatacatgttcggtattatttagatagtcaagcatagtagcttgaggtgacttttggcggcgttcacctttgattcgctggtcgagtgtacatttatcgagaagatctaattctgcatcaccagttttatcaccgactataataattggcatttggtccaattcgggacaaatataaggtatgtcgaacttacgttcgcctacttcaatttgtgtaggttgataatctaactgataatcaagactcgaaaagaaccgttccatgagacgacgtacagctttcgttccgtatgggtcgcgaagagagttacgttcagaaaatagtttccaatcgttacgcagactgctccatgcattatcaattttggccgtgagcgaaacatcaagattaaaatcttgttcacggttaccttgcatggaagattcagtctctatttcatgtaaaatatcatctgagagaagatggccatatatatgtatagaagtataatccatatccaatagtttactttaaattcttatcaatttgatggattaatttgaaagacaaacgcttatggaagttctgaaaagtctaaggtaacgatttggagattgtgctaatttcagtactttacagtctcatacttatgaacaacttttataggacaaagatactattttttttgaataagagaataatttcacaggaaaaatagaaattttatggggaagtgttctgatagcatgtcgttgtagattgtagggaggggatgtaaaacggcaggcacatagaatttccgatattcagaaagccgtattcccaaaatagagattatttttgaaagaatcacataatccgctaagaataaaagtttatgcggatcatcaaaaaacgaggtaacgagttggcaaccgttctggtttctacatacttgcatcaattgcgttgatgtgcaactcactttatgtaaaggtacgattttttacggaacatgcaaaacacctttgatttttcttttttagcaaccgtcaaaaacaatctttcggtttcatatcccggtcacaaaggcggtacagtctctttatgaaaagtaaacaaaggtcaggcaggattgaaacagactgttacgagaacagtcagaaaaggattgcatacaggaattacagtctgataccgggcaggggacgactttgtgccaaagtccaaaaagaggttctttttccagacggcaaactccctcacctctaaaaaacagtctgtggctggcgcacgcaaacgtccagcctttatgcggacagtcttaatgcccgcagcctgtacaagtgcgtaaaaaacaggtaaatggaatcttcatccgcttccccgcgccttgccgacactcctatattcccgttccaacacctgctcgatctcgctcctcttgtacaagaccttgccaccaagtacatagtaaggcagcgtgccgttgctccgatactcgcccaatgtcctgcggctgactttcagcatacacgccacctcactgtcgcacaggtacacgtcttcttttggcggaaccgcgccatctccgaaaatgccgtcaatcatcgccgacagccggtcgatacgctcgtggatggactgcatccacgcatcgtctttcgttttcaattcattaaacattatatagattaatttgttatatgactcattttgtgactgattctgaagttgtgtaatccacaagcaataagaatcaccatatcttcgaaaccgaatttatggcatctgaatcgttctttgacaatacggcattttttcataccacctatggcatgctccactttaatcctaactccggaaatccgcttgttctcttgtttttcaacacaagtaagctctttccctttaggtttctttttgggcatgcatatttcaactccatccggtttgtgtccgatgaaacctgtatcctgccagagcctaatacctttgggaagtagaagaggttcttcatcacaaatctttttgtcatggacatgacctttgtatgtggagctcaaccatacaatccgaagattgttagtacataacaggttattctttatgctatgagttttttttaccactatagcatgcagactgccagtcttcatccaaaggacgctgaataggtcgctcggttccgtccaacaagacttcttcgcacccttgaagaatgtgtatcagacgtttggagttacggtcaggcaattcaccaagcgttttcaatgtacgccggagaatctcagaaagaaggtgaatccatctattggcctggggctgggtcatctcaaactgaatagcatggagttcctgaaggggattggtcttcagatataccaatatgaagaacattttgtcctgaatcagagacaacactgttgtaagatatacgttggcgcactttaccttccaaggtaaaatggctgtaatattcatcccaatggtacttgaaagttattagcaaagcgtcaaactcagcaggagttaatcctgtcgcagcaagcacttggctatgacggtggcgaatcttgtcgtaatacatcaattgaactttttagatcacaaagataaatcaaagaacgctttaatcaattattcgatataaactctattatacatactgctcatttgtcttttgttgatacttcagttcaattccttcaaatggtgtgccccctgtagcgtgcatccttgcgtctgtcctccactttcgtgacgatacgctccacgtcttccggcaggtaataggtacggttgcctatcttggtataggcgagcgtgccgttatcccgcaaggtctgcaaggtgcgcttgctgattttcagcttcaggcagacatcctggtggtcgagccagccagccgtcctcttcacgcctttcaaatccagatggggattccctccaccctatgtatgaaccgttcgattttcatggcaaattcctcgaacgccttcctttcaaaacatacggtttccataacaatccgattttatgttgatacttcaaattcataccatccggagaaacggtcactcgtggtgccggtataacagcgcatggaagaatttaatctgaaaactgaccgtgcagatgttattgttcccgccgctgagatatttctgataattgcaggtattgtcaaagctgagtatatccatgttccggtcattggcttagcagatggtattattgacaatttgtatgccatatacctgaaaacggaataaaaggaattgtgcatagctgttttaactaggggatattcagtaaatcctataaaattagccaactaattcatactaaaagtattgcgaattagttggctttttgtatctttaggtatttcccctaaaattttgaagaacgattgacaaatgcttcagcggagtcgttcaatgctaaaatcaaagctcttcgaagccagtttagaggggtggctgatctgaaattcttcatgttcagactggctaggctatacgcttaaaggaaagcttgccaaccggaaaaatccgctgcccctggaaaaagcagcatagccaaaagaaaatatagcagaactgtaaaatataaaagagtttgtgccaacgttttgacacaaacttagcagattactattcagctgatacctattctgaaagatgtaaacaacttgtttcttagatagccttataaatattctactacttattacagttcatttagaaatgttattctcacttttattcctccgctttttcacttgctccactgcttcagatatgattcccttgttttcaaaacgctgcgtgtaattggtgtaatccgggtgaatacgttcgtaagttgggtcagtgaataagggactcgtaataatgtggtccgcagtcgaacggttacagcagaaaacaatattttcaactccagccagtctggtcaatgctttcacatccgtatcatgcggctgtagtgtcatcggatctgtaaaaaagaacagatagtctatttctccttctacgatccgcgaaccaatttgctggtcacctcctaaaggaccagatttcaggattgtgatatcccatttgatttcaggatgtttttcttcaagggcttttttaattagtgtaccggttgtacccgtacaatagaatttatgtcctatcagacgttccgagttccagagaacccactctatcatgtcttttttcattgcatcgtgtgcaacaagtccaattctacgaacaattgtttccataaagctaaattattttatttttatatgataattataataacaaaaaaactaattctattgaaggccggaggatgaccggataaatctgagcaattctttgtttgcctggctatccatgacggtttcccgtttttcttcaaaaagattgagtgttgtggagcattccccacagatgtcaatgcctactacctgttctttctgaagaataacagccagcagtttctccaattcccataagctgagagaaccttgatcccagtttgttgctgccgaagccggattcaagacatccttgtctatggaaatgtaaaccggtccgttgatatgtccggaagaaaagttctgccaaccctcttcgtgcatgagcgtagtttcactgtaaaaccgaacttgtctttcatatcctttcggcacagcctgtatcagtttgtctgaagaacctacgataattactttcttgcagttgttgttatggtccaatatatcctttacccaacttccgcaagaaagtatgttgtcaaacaacggtggctgcatatcgggatggtggtcgaacacaatcagcgaaaacggagtttcaagtttgtctgtccagaatttagtcaaataatgataattgcctgaatcaatgaaatggactccctccgccggataatcagcaatcatccccttcaaagccaaagccccctccctgtcacagtagccatctgtaccataaagatgacgacaatccagccatataaatttattgttccgggcaaacgcctcgtagtcatacactcccgtgaagttcatgatgatgatcggccatgctatccgtttatctgttttttgattttgcccgctcatacgttgtttttgcatatccttttactgttcattaaaaccatcgtacataacagaaatcttgtcggtgaggtaacaaagcattcttgggatacatacggaaggcctgcttgaagcttccagcgttgaaaatgccggatgtcgccttaaaggtatataaattcccattcttggaaaccggcaaaaggggaataacctcatatatgtgatcctgaccgtcttcacgcctgataatgaccgattctattccgattgcgtcatccaggcctttctcatcaacgacaaccgtcacctcatattcctttccggcttcaaccgtggcattcagcccattccctgcctctatggatttgatttctatggcatcccatctgcttcggacgtttgctttccagtcagccatcattttcgccttcgcaaagttgtcggctgccagaatgtggaaatgctctgacagtttgttatagaacctgtcatagtagtcgtccaactgtcttttcatggtaaaatggggagcgatttgtgcgattgagttcttgatatacttgacccagtcttccgaatagttcttccccccatgctcgtaatacagtggcaggatgtcatgctccaacaaataatagatggcttcggcatccagctggttttggttctgttcattctgataagtccttttatcagtcagtgcccatccagcatccttacggtatccttcataccaccaaccgtccagcacggagaaattaagcacaccgttcatcaatgccttctcgcccgacgtacccgaagcttctgccaaccgcgtaggggtgttcatccaaatatccacccccgagataagatggcgtgccaggtccatgtcgtaattctccaagaatatgattttacctaaaaattccggacgccgggatatttccacgatttgcttgatcagcccctgcccggcaccgtcattgggatgggctttgcctgcaaagatgaactgtaccggatatttcggattattcacaatcctggcaagtcggtctatatccgtgaacagaagatgagccctcttatatgtagcaaaacggcgtccgaagcctattagaagagcatcgggattgaatctctcaaaaatggaaacgctcaatgccggatcaatctgactcctgagccagtccttgctgcatttgcttttgatatagtccagcaattttgctttctgttttaaccgggtattccatatctcttcatccgggatgccatagacggcctcccagattttctgattggactggtcgcagaaaaaattctcatcaaaattgtccttgaaaagctttttccattctgccgcacaccaggtaggcagatgtaccccgttggttacataacccacatggttctcttccgggaagtatcccttccagatcggcgcaaacatttgctgggataccgatttatgcaacttgctgacaccgtttacctcctggcaggtcttgcaggcgaagacagacatgcagaaacgttcctccttgtctcccggattgtgacgcccgagatccatcaggttatcccaggttatacccaacttgccaggatatcccttcatatatttattgaaaagcccttcgtcaaaataatcatgaccagcgggtacgggagtatgtacggtataaagtgaggaagcacgtaccagctccatggcctgcccgaaattcaagccgccatttatgtaatcacaaagccgctggatattgatcagtgcggcatgcccctcattacagtgatatacatctttcgttatacctaaagctctcagcgttatcatcccgcctatgccaagcagtatttcctgttttagccgattctcccagtcgcctccatacagatggtgagtgatagggcggtcaaactcgctgttgagttcattgtccgtatccagcagataaaggggaatacgccccacactggctttccagacattggcatgtaccacaaaactgtcggcataggggacgtggattaccagttgtttcccatccggttgcattaccttttcaatcgggagctgcccgaaattctgcgctttataattgactgtctgctggccgtccatggaaagcgactggtcaaaataaccgtaacggtacaaaagtcctatggcacaaaggtccacattgctgtccgacgcctctttcaggtaatcccccgccaacattcccaaaccgccggaatatatcttaaggacttcatccaagccgtattccatgctgaaataagctattgacgggcgctggtgatccggttccacatctacgtattttttgaaggcggaatagacggcatccattttatagacaaagttctcatcatgtgccagcgctacaagcttctcataatttatccgctccagaaacaataccggattctgttccacctctttccaaagttccgaatccaaatcacaatacagtttctttgcgtcatcattccatgtccaccagagattatgtgcgatttctgcaagttttcgcagttctgcaggaagatgtgaacctactgtaatctccctccactgaggggtatttacattataacttgaatattccatgacattttaattaaataagtcctaatctttattcagtccttttattatttttcgtttaccgacaatccataccgtatcattctccttgaaaattgtatcagggtctggattcataatattcacggtactcctctctattccgataatgatgctatccgatatgtctgcctcccggatcgtctttccgatcaatggtgaacctccttcgacaggaaattgccctatttccatctcatcctgcgaggatgttccgttcccgttcctttctaccttcttttgctccatggatgtccggaagctttccaactgtcggtccgtacctacgaccgtaaccttgtcatatggatagagatgttcttccccttgtggtatatctaggcgtttttctccacgggtgattgaaatcacatttatctgaaacaaggtgcgcaagctgctttcttttaatgttctgcccacatatatggaatcaggggatactgtgaaatccgccaaatgtaattccttgaacgggatattgctgccaaaggtggagcctgtatcactttctgtagaaagtccattcccgtccgtcccctgaaagtttgccataaattgtctctctatagtcagcgaccgtttcttgatccgcttggaaaaataaatgacggcaatgataatggaagagactaccaacccggctcccaaggcaacattgaaaagatgggtaatgatactcatcatgataatcgtgcagatcagtattttgacaagtactattgataccaaaggccctctgttgaacttgttgtccgtccagagtttacggaactcggttgaattgttccttttcatgatgatggcccatagaaacggggatatgacaagaaagatgatgatgaagcccaacaagttcccttccattcccggcagacttttcctaatcaaaggatgcacataggaaaaatataaagtgatgaaaaaaacgcatacgaccagatagagtgtgacagacaccagcatagaccggatcagtttatgccaagtaccctggtgttttacagtcattgccccggacgtatagtgtacgagataatctttcagggattcaggcatgtggatgtctataaaccggtatgctggttccgaaagccgtatcatatagggggtaagaaaagtcgttatgacagatactgccactatgaccggatagagatacttgtccgtaacattcagactgacgcctaaagatgcgatgatgaatgcgaattcaccgacctgtgtcagtgaaaagccggactgtatggcaattttcaacggctggccggaaagcaagacaccaaagctcccgaacagtacctgaccggacagtaccagcaatgtcaggatgagaatagggacggcatattcccacatcatggcaggatcgatcatcattcctaccgacacgaaaaatatggaagcgaacaggtcttttaccggctgtacgatatgtacgattttttccgcttcaacggtctctgccagcagggaccccatgacaaaggctcccaatgcggcagaaaatcccgcttttgtcgcaatcatcaccattcccaggcaaagtcccagagaggttatcaataaaatctcgttgctggtgaaacggcgtatcttcttcagcagggtaggtatcagatagatacccaatgccgaccagaaaatcaggaaagcggccagcttcaatatactttccagcatctccttcccttcaaaatgtttgcctaccgccaacgtggaaagaacaaccatcatcactacagccaccagatcttcgataacaagaatccccaagacaatgccagtgaatttctgttggagaagtcccatgtcattgaaggccttgaatacgatggccgtggacgacatggacaacattccacccagaaaaatactgctcatgtgggagaaccccattgcattccccgctgtataacctatgaacatcatgccacatacaatagtgacagtggcaacgatagccgtaatgcccacatttatcaatttcttgaacgaaaagtccagtcccatcgcgaacagcagaaaaatgacaccgatgtccgcccatattttgatattggcaggatcggaaacagtcgggaccagagaaacggaaggacccgccataataccggctacaatgtagcccaatatgaccggttgcttcagccacttgaaaatgacggttacaataccggcaataatcagaattatggcaagatccgatattaaaggagcaacttctgacatattaacggttattttagatcgataattcgttaaggacccggatcaggcttttgtcaataggcttgtcctttttgattgcctggacaaaaggaacataaacaatctcgttgttccgtatgcctatcataacatttcgctggccttccattaaggcctggattgcggcttcacccagccggcttgccagtatacggtcattggcactcggagcaccaccccgttgcagatggcccaggatagaaaccctgacatcatacccgggatattccttctttacccggtcggcgtaatatatggcacctccattcttgttttcaggactttcggtcacaattacgatgctgctgtttttcgtctttctgaatccgcgcccgatgaatgtttccaactggtccacgtccgtcctgtcctccgggatgatggccgcttcagcaccggaagctattgcgctgttttgtgccaggaagcccgcatcacgccccatcacttcgacaaagaagatacggtcatgggaggttgccgtgtccctgattttatccacgcattccacaatggtgttcaatgccgtatcatatcctatggtaaaatcggtaccatataggtcattgtcaatggtgccgggcaatcctatgcacgtcacatcatactcctccgcaaagatacgggctcccgtcagggaaccgtctccaccgataattatcaaagcattgatgttctctttctgtatgaccttataagctttcttgcgtccttcgggagtggtgaaagtctcggagcgagctgttttcagtatggtgcctcccctctggataatgctacttacatcttccgtcgtgagttctttcacttcaccggcaatcagcccctcgtaacctctataaattcctttcactttaaatccgttaaaaatggcggcgcgggtcacggcacggatagccgcgttcattcctgaagcatcccctccggaagtcagaattccaatatacttgttatccataatttgttttttatattttaattaatcaggcaaaattagaaagcaactgttttagcctttttctgctataaaagatacggctttttatcgtactcagtgacactcctatctttgcggctatttcccgatatttgactccggtacaacataaaaacgacataatgtgctttaggcaatgttttaagggcttcccttatctcttttgcatcatgcccgttatccacgaaaatgaaagagtcgtcccttaacaggaaatgatattcaggttctgataatacatataaattccctcgtattttctttgtccggcaattattgataaatgcattgcgcatgatggtatacatccagcctttaaaattcgtaccggaatcaaacttatccttattatccaacgtcctcaacattgttccctgcaacaagttttctgcttcatccttgtcagcagtcagtttatatgcaaaacaatgcagttcattctgaagggctaccagcgctttatcgaaatcaaatcctctcattatatttattttggaattcaaatatccgggtgaaggcattccctgataataagaaatgccttctgtagagtctcatcaagatatcttatttgacatcaatagttttggtggtttcctgaaccttcttatctacgactttgggaatatcgataaacaggaccccgtgttccactttggccgaaattttatctttttccacattatccggcagcaggatactctgctggaatcgggaataggagaattcacggcgcaagtattttccgtctttcttctcctcctttttctcgtcctttttttccatgcagattaccagattgttgctttcatccacacttaccttaaaatcattcttggtcattcccggagctgccagttctaccttgtagtccttttcattctcaatcacattgatggctggagccgtagcgtttgctcttgccatccattcattgtcaaagaaatcgttaaaaatactcggtaaccaattctggtttgtttttacaggtaccatttttacctcctctttaaaagttaataattaaaacttaaaaaaaagcatctgcttgatagacagatttttattttttagccatcccttgtttggccacagcttctgcccgtttccgtatctcttccgggtttccaaggtagtagtccttgacaagaaccagcctgtcgtcaaattcaaagacataaggaactgccgtaggcaggttcaggttggaaatatccgtatcggaaattcctttgagatgcttgatgattccgcgcaggctgttaccatgggcgactaccagcaggctgtccttatacatcaatgcgggaaagatgatgcatttccagtaaggcatgacacgcccaatagtatctttcagggattccgtacggggaagttcgctatctggtacaccggcatagcggatatccatgcccggattacggggatcatctttgcctaccggagcgggagccacgtcatagcttcttcgccagatgtgtacttgttcttcaccatattggaccgctgtttcactcttattcagtccctgaagcatgccgtaatgcttctcgttcagccgccaggtcttttcaaccggaatccagtctttatccagccggtccaagacacagttcaacgtttttacggcacgtttcaagtaagaagtgtaagctgcctcaaaagaaaatccagcctcccgtaatgcatcgcctgccttgcaggcttcttcaactcctttctcgcttaaatccacgtccgtccatccagtaaaacggttttctttgttccatagactttcgccatgacgtaataacactattcttttcatggatacttcttctttatgcaatggttattgaagaatccagatatacgtcctgaatggtgttcagaagttgaattccgtctttcatcggtttctggaaagccttacgaccgctgatcagccccataccacctgcacgcttatttactactgccgttacgacagcatcatgcaggtcggattccccatgggattcaccgcccgagttaatcaatccgacacgtcccatatagccattcgccacctgataacggcaaaggtctatcggatggtcagtggtcagttccgaatacatacactcgtttgtctttccgaatccgatagccttgaaaccgccgttattggatggaagcttctgcttcacgatatcggctttaatggtaaccccgatatggttggcttgtcctgtcaagtcggcagcggcatgatagtcggtaccatcctttttgaagctgctgtttctcaaatagcaccacagaatagtagccattcccagttcgtgggcatattcaaaagcctgtgacacttccactatctggcggcggctttgttccgaaccgaaataaatggtagcaccgacagctacggctcccatgttccatgcctctttcaccgtaccgaacattacctggtcgtagctgttcggataagtcagcaactcattatggttcagcttgacgataaaaggtatcttgtgtgcatatttgcgtgccacggcgcccaacacaccgaatgtggatgccacggcattacaccctccttcaatggccagctttatgatgttttcgggatcgaaataaagcggattgggggcgaaagacgctcctgcagaatgttctatgccctggtctacaggcagaatggatacatagcccgtattggccagacgtccatgtccgtataaagcctgcaaactttccaatgtacggatattcctgtcggaattcatccataccttatctatcatatccggtcccggaatatggataagttgtttgtctatcgtcttacatgtatggttcaggtagtactcagcctttcctcccaataaatctactattttcattttatttatttttattgattattctggtttatgactcccgttcacccagttttgcatccataaaaaggatagcacagtctccggctttcctcagatgactaacaatattgagtacattcgcttcatcttctacttgctcacgaacaaattgccacaagaagtcctgagtggcattgtctttctcttcggatgctacctgtaccaactcatcaatcagtttggaaacatgtttttcatgctccaaagcatgctcgaatacttcaacagggttaccccaaccttgtggaaccacatcgaccttgtctactttcggggttgcctcacgcttaatcatgtacccggcaatggcatatgcatgcccggtctcttctgcagactgtttctgcatccagcgagccattccggaaaagccctctctttccagataaaaagacattgataaatacaggttggcagaccataattctgctgtgatttgctcattcagagcattttgcaatttttcagtcatgatgaatcaaacttttaatgttaataataaatccaaattatctctcttctttaagaacaagcatgggcttgtttcaagatttcaattaataccggacgtatcccgctgataaaacattccacggcgatcaccattagaataagtcccatcagtctcatcatcacattgtttcccgtctctcccaagatttttaaaagctgggtggacgcgcacagaataaagaaggaaagaatgcagaccaaagcgattacgccaagcaatactattttgaaagtatattccgaagcatcttccatcaatgttattccactggaaatcgctcccggaccgcataacatcggaatggcaagaggtgtgatggttatatctttggaatattcttttcgttcagtttcattcagtttcacatgggtaaaatgtgcctgcaacatatcatatccgattttaaagatgatgatacctcccacaatccggaatccgtttgttgagatgccgaaaaaatgaaacagaaacctgcccgataatgtaaaaaggactaatatgataaatgcaatggtacatgctttcaaggcgatatatctgcgttctttcgtatccattccatcagtcatttgcaggaataccggcatcactccaagagggtccatcaaggtgaatagcgaagtgaaacacaatgttaaatatacaaatatatccatgatgacatatagtttattatcgattattatatcgcaaaaaacataccagatagcattctgcaatattaaattttgcataacatcaatcttaaatccataccgtcaaaaataaggtagtttccgttcgttttccttggcgaggatacgtaacaattccataaatgccgtacttacatatatacggtctgcatacagcccgctgatgaaagaatggaaggacatgcttacattccagcataatatgagaaatgtgtttacctgacgtgatatgtactgctcatgttcaagcaattcattcaaggcattcaatggcgttgtccattcatgtgtatcccgtttcatttcattgattacaacacatcctccatcatggcatatccgattcatcatctgataaaccttgttcatattgtcctgtgcttgggagttcagccaggagctaagtattggaagccgttcatcttcaaaataaacctgcaatgacaggtataaaccggttgaccatatttctgtattgatcaactcattcatggcgttttctattcgtttatccattatcactctgaatattgaaaatccattactaatatcatgtgttattctcagtatataaaaattccattcgattgtgggtaacccataaaacggaattcttaaacgaggcttaaataataggataacttatcggcgtagacaaattgtcataaaaaatagcactatgatgtctttttgtcttgcctcccttgcagaatatccaataagacatccagttctctttctattccttcaatcttatcggaaatacagtccaaagtattatggtgcagactagctttacactcctgcaactctcttgacagagaaagtatctgtaaccaaagttcttcctctatgtgatagggggagttactattatctagtaccatagcaggagaaggcagaaaagtgctttggcatgtaatttgtatgataatgaacggtatgttccgaaagagacaggaatggaaatgaaaggatagaatattccacaaaagacagtaacaaacaaagggggaaagtcgttggagacagttgtctcgcttttaaaacaagttgctttcataatgtttattataagccaaccctgttccctggagttgtgtttatataaagttaagcgtgggaactttggtattaccgttcagaagtatccccatactcaacaacatataatacacaaagccccacgcctatatataacaaaaatccatatagatagaacgtgaagcgtccaatgtattatccaattgttgtttcgaaattggggatttcctgaacttggataatgccttaacgctttactataaatcttctattttcaaaagactaatacaaatgtaataaaagaaatgaattctttgaaaggaaatatctcttttttttaaggggtggcttaatttttctttatttaaagtcttagaattactgcccaccaaagcccgtcacgaatgttttgaaatcctcaagctgtacattaagctctatatagtatagcagaatagcagaaaaacagaccatgataccgcaggtatataggtcataacccactcttccgtaagtatcttatctatttgacaataataaaaatgtaaaggaggataatgacatggacaatattcgtatcccaatacatataggttaacatataagggagaatggtcacggagtccacaaaccatagaatgaaaaaatatatttccatcgtgtacggtttatgtctctatccggatatttgaccggtgccgcaaatgcgcaatgcatactccacaaaaaaacaccagggaggaaaaataagtcatactgaataacgcctgtctgtaatgggccatggatacaaatgaactacagataatagctgcaatagatataacgatacaagcacaaaataatgtacgaacgtgtccatcagttgcatttggatgaaacagtaccactttatgcaatgtttggttagattgagtctgaacataggaccttaaaaattagacggatataaatttactaaaaatctgtggaaaagaggaatagaaaggcggaaatgtttttaaaacggctatgaataaagcgtttgtgaggacaaatgaggacaaaggcataaaacgaggtaacgcaaaaaaaagtaaatttatgaagtagaaaggttgctaaatcattaccccgtgaaaggtggtttttgatactccgtgctgaatttttctccgtatggcttcggttggtttacaaggcataactcattgatacttaattttaaacttaaaaaacgagtatggcaagaagtacattcaaagtgctgttctacgtgaacggcaacaaggagaaaaacgatattgtccgcatcataggacgggtaacgattaacgggattgtgacgcagttcagctataagtagagtatcccgaaaacgctttgggacgtgaaagggaacagggcgaaaggcaagagtgcggaagtacgtgatatcaaccttgcccttgacaacatcaaggctcaaatcatcaagcactacctgcgtatattcgaccgtgaagcgttcgtgacggctgaaatggtgagcaatgcttatcagggtatcggcagtgagtatgagacactgctcaaagcgtccggacgtgagaacgaagtattcaagaagcgtgtcggaaaagacagggtaatggcaaccaccgttcacgggtggtggcaagaaaccatgtggcagcgttcatcaagtctttttacagacggacggatatgttcatgctggagattaagcccgacttcatcaaggggtttgcagcctacctatcaacgaaagcgggacttcacaacgggacgatatgggaaaaatgcatgtggctgaaaggcgttgtcatgtgtgtgcactttaacggactaataccgaaaaaaacgtttgcccaattccacatcagccctaatgtgacggaacgtgagttcctgacggaagatgaactgaaaacgttgatgacgcacgagttggggatgtccaactgttctatattcgtgacatttttgttttcgccagcttcactgccctctctttcgtggacatcaaggaactaaccaatagcaacatcgtagaagtgaatggtgagaagtggatattgtccaaacggtacaagacaaaagtgccgttccaagtgaaactgttggatactcctttgcagattatcgagcgttaccgaccctgtcaggaagacaatctcatattccctaatctcaactactggtctatctgcaaatctctgaaaaaggggatgaaagagtgcggataacaaaggatatttcatttcagtattaaaactattaaacgggcgtaatttaattcgacagaaaatccggcttctgacagccattttttcacttcattccgagagtttgcagtttgactgccataaacagcaatatttcagcatggggacatagtttgcggatattatccacactttgtgctgttccgcttcctccatgtgtacagaatgggagtatctttttcccggacaaatcataaccggacaggaaactttttacaggagaagacagaagaccaccccaaataggactaccgataatcaatgtatcataatcatccatattctctacttttgtacgcagagctggaagaatatgattgtctctttcatttttgaaacggtcaaccacttcattatattcatcagaatagggttcttccggttcaatctccaccatgtcgcatccaataagttcatggataatgttggctacagtttgcgtatgtccgctccatgagaaatagactatcaatgttttccccggctctgagtgaggcaacgaatctatcttatcttcaacagccggagtgttgctgcacgaaaggaaggttaagagcagcattgccaataagcacttcagtttcataactatttttatttaggttttggggttatcctctgttaatttctatctgtccagctgtttctcatacagccacttcgacagcaggtcagctacttccacattgttcaaatccgacatcgggaagtgcgtattcccatgcagaccgacatcgggcagatgaatgaccgtcacgtcaccgcccagcttattgagcatttcggcccacttgcgcatgagatgcagacggcgtgtccattcgtaaagttccggatgttcgtctgtttcgggcaggttatccccatagtaaatgatgatgggaatttccatgtatctcttgaaaactgccatagggacttctattccttctgtttttttagaccgtgtcaagactttgccttcttcgggaacttgaccggttgggaagggtacacttccaccgggttcgtatgctacaatggctttgatgttcttcgttttgagcaaagtaaaccaacccaccggaccgccttgtgaatgagtgacaaatatggccggaccgattttgtcaaaaagagcagcataggcatcggaatagacatcgaagtccaaaggtccgatggtcggcgtcatctgccggaagtactggtttaaggcttcccggtcgcgactgaactgtacaccctcgaaataatcaggatagattcccacacggaaacggttgaaccattcttcttcatcgaataccggttccagtgtgacagcttccgtactccgtccggcatttccccggcgaggctggtcgacaagataggtggagaaacctttgcgaagaaatatattctgaaacccttcgcgtccgtcaggagtggtctcccatgttttggaaaactggccgacaccatgtgcaaaaacaagcggatatttccgtgcatcaaccggtttctgataaaatacataagcatggtcgccgtggtatttgtgtcccaatgaatcggtcagtacggtgccacctacggcaaaactgccttgttcctctatttgcagaatattccctttgtaacaattacagcccgacagtaaagcgatgaacgtcatgtaaaatatctgtttcttcatacacggattattttgggattttagactcctgcaaggcatcgtagcggctacccaccacaggaatggcagctacggctgtttccagttcttctatctcttctgccgtgaaacggatgtcgcaggcacgaaggttctcttccagatgagagagtttggtggtgcccggaataggcacgataaaaggcttcttgttcatcagccaggccaaagctatctgtgccggggtaatgcctcttgtacggccgaaagcgttaagaacttccacaatacgatagttggcgcgtatggcttcgggctggaagcgtggcaaggtctgccggttgtcgttggtaacatcaaacttggtatattcattgatcataccgcccaaaaaaccacggttcagcggactgtatggaacgaaaccgatgcccaaatcctcgcacagctccaacactccgttcgtctctaccatgcggtgcatcaagtgatattcgctttggattgccgtaaccggacatatcttgtgcgcacggcggatggtatcaacgtttacttcacacatgccccaatgcaggattttaccttccttgatgagtttgctgcatgtttcagccaccgcttcaatcggtgtgttcgggtctatgcggtgctggtagaacatgcccaatgtttcaactccgagattgcgcaacgagttttcacaaacccggcggatgttggccggagtgctgtcctcttcggttttaatctgcacaccgtttacaaacttatgtccgaacttcgatgacacaaatacccggtcggtatatcctttcaaggcttcgccgaccaatttttcattgatgtggtagccgtagctttcggctgtatcgaaaagggtcaccccacgttcaacagcttcatgcaccagggcgatttctttttccctgctcgggtactggctgcggttatggttcaagcccatacagccatatcccattgcagaaacagtgaatgccgtatttccgtgtcccaatgttcgccgagtgcgcaccgccgccatgcctgcagggatgttgtttgcaacttgttgtttccccatccatacccgttctgctgccgttaccttgttcaaggtaggcccgacacacatggcagctcctgtcaatgccgccattttaaggaatctccggcggctcatatccttgtctttatccatatttgatagtctttaaattatttctgttgcaaagttaacgtgacagaattgataaactttttttgatatatatcatctaagctgaatgatgtattatcctgtattccaagcgatatttataggcaactatctttcaaaatcgtatatattcagtcctaaatccggattatatgtgcgacttatccgctcgctataatcttccaccacgaactcccctgcaccattctgtattgcggaaagtagatgtccggctaaagcggaatagtcgctcctgccgacggttatatgcaaatgaagatatacctgctcattcatagatgatatattccctgtaaggttggatatttccatttgctcccggaatgtcttatcatcatatgcttttgtcttgggattgaagaaacggagggtcagctctccgatagcaccaatcccgttgatagaacccgacagaattcctttctccttgcagaaagcattcagggctttcacaatttcagtatgattgttaatgctgacaatatacttgttgccaattttcttgtacgaatacatattcttttcgttttgtgcgtttgccggagcaatcagtaccccgacaaacagcaagataaacaataatttctttataaaatgccccatcagtacacttatgactgtctctgttttgattaatcttaccataatagataaaattatcccacatcagtgctttccacttttgtttttaatctgcacaccgtttacgaacgttaccttgttcaaagttggctcttccttcttattttccatattcttccattatatcacgcggaatttcccataaaacactgttttctacagcatccatcataagatgtgttggctctcggttaaaatagctgtcaatacaccagacaacatctttttcacatgctaaatgttctatcacatccttatcatgctttaggtagtgctgtctaataaatcccttttctatataaaataggcaattacagatatcaccttcatttagaattatatcacctttttgatatttcttaggctgaataatatctgcaaaaaggcgaatattctccaacttaagtttgcgattagggcatgtttcagctataatctgttttgcaatgtcaaattgaatactcataggctaaagttatttatatccaacattttgtttcaattttgggttcaagtctatacttttttgtggaataggaaaaactgtggtatacccatttttctcatcagccagttggactcgctgatcgtatgatttgtgataaactccaaaacgcaccatatcttgtcgtcgccagccttcccatactaactccaacaaacgctctttcaatatgttctcaagcgtagcttctcgatatggcataccaacacgacctcggacttcgttcaactccaacgagccatcctcaccattacgtacctttgcctcggacttcatcaggagagcatcggcatagcggaatagcacgatgtcgttatccggttgtctaccgtcggaatgtgaggtcctatcaacctcatattttgccatacgagcaccagctgtcttgacataggagcttcccgtaagattcaactttagctccaatgggaaatactccaactgctgtccattgtccatcattacaggctttccatcaacctctacgatgccggcatagaagttcttttcaaagcgagcatctacatcatctgtgccgtatccgttggctaagactgttgagatattggcactggtaccattttccgatgagccacccaacgcaccgccatggttgtagtgtcgtgatcggaagagataccagaactgcgcagcatagaggttcttatccaacggaatggtgaatatgttttcgttggagttctcgttatgcacagagaaattatagctataatcgtcctccaaccgataacctacctcggcaagtttattgcaatatttgatacaggtctgccaagcgttgagtttctcaccatcgacggtgaaaaatatctctttaccgttccgtggaacgccatcagtccaattatcatcacaatatatctcggcattaagagccaacttagccaaaaggaaattagctacaggtgttgttatacgaccatagtagttacccatcttattactacgctcatttggcaacaactcggcaacctcctgcaactcattcacgataaaacggaaaacctcgctacgctcgctctgcacaacttcatcctgcggttgttcataggatgttacgatgggcactctgccatacatatccataatgtagtagtagaaaagtgctctcagagctcgcacctcagcttcgtaggccactctctgctcctcagataggttatggctatacttatcgatgatatgcagagatttgttcgataacacaacaaccttgtagaggtatttccaagtattgtagagtggtaaatcattaggactccacttatgctgatacatattcgtccacaaacctccatcgtaccagtcgccaccacgaataggtatcatggcttcgtctgtagtaagtgtgttatagtcataaatcccacgacaggtcccctgtaaaccctcactgtctgcactgccaccaatgtaattgtagagcacagccactgcattaatatatatgttgttggcattgttgtaaatgtcttcttcataaagttgatctctagggtcttcagtaagacaagaggtcatcatcgttgccaaagcaaccatcaatatgtttatatatcttttcataactgtaagcggttagaattgaatactaagacctaacgaataggtacgatataaaggataggtgcgtttgtcgtcaatgcccaaagtgttgcttactacataactgtttatcattggagtaagaccgctatagcctgtgattgttgcaaggttgctaatgcctgccgaaagacgcaatgacttcacagccttggatttcattggaatattgtagcctatggtaatatgttcaatatttacatagtcacctttttccaaccaatagtctgaaacattctgatcaataatatttttttcaggagcacccttcaatacattgtagtcagggaatatagacatattggtataagccaagcccgtgccattgaatatcttatgaccgaaagcaccatttatctgcatggcaatatcaaaggacttgtaacggaaactgatgtttgatccaatagttaccttgggggttgcctgacctgctatatacctgtctccgccatcgctaaaatcaatctcgccatcatcattcaaatcttcaatatcgtaactgtagccaccaagttcattttctttaagccctttgcagtgaggtagatagaatacccccaatggctgacctacaatctgatatactacattattgtctccaccgttctgacctgcaccataaagcgagccaatcggagtaatatctgaagctgtcatatgcataccattatactctccactaagcgaaagtaacttattcttctggtaggacatattgaagttgatattcatctccatatcctttcgttgaatgggaactaccgagattcctagttcgacaccctggttagacatcgagccgatatttgccatcagtttatcgaacgcaaaggtcggaacgggaacatcatactcatagagcatatccgttgtctttgagtaatataattccgaggtaagcatcaaccgattatcccatatacctaagtcaaaaccgatattaaatgttgaacgagtctcccacttaaggtccggattcgtgttgcgtatacttcccattgttacggtaggtgcaccgttgatggatacgataccattctcctttacggtattaagtgttgtataggatgttatacctccaagatttcctgaccgaccatatccggttcttagtttcaacattgttataaagtcagtatcagagaggaagccttctttttttacatcccaacccagtgatactgatgggaagaatccgaaagtattgttatcgcttaccattgaagagccatctccacggagtgctgccgcaatagaatatctatccttgtaactatatgtgacactacccattattgaagcaagtgacgggtcttcatagctactgctcgtaccaccgaaaggacgcgatgatgttgctccgatgttattataggagaaatcatttgttgttattccttttgcctgcacccataaaccagtccttacctgtttaagatattctgcgccaacaacagcatcaaggtgtgagtctccccaagcattgttatatgagagggacacatttgtaaagtagtcttcacccttgaactctccacgataaacattgccttgcgcccacacccatgtaggacaaaattgagcatttcccgtagatgaatatgaataagagccgaaagccgacaatatcaaattgtcaaggatattaaatttcagccccaaatgtgtattgaaattccgttcttcggagtcatttttctcatagaggagtgctccggggtggttgatgtgtgatgcagccgagttcttcacccagttgccattaacatcagttcctgctggatatgtaggattctgtgcagctgccgagtaaaacagtattcgtgtatcgaaaatgtcgtgtatctttgacgagtagccatatacaccaaaatcgccaactaagcgaccatcgaaagccttttgtgtagcatcaagttttaccactaaatttcggtaatcgttaactttgacaattgtattatgatccataaaaccgaacgatgctcgatagtttgagttttccgaaccaccgctaaaagccaagtgatgctgatgtatcaagcccgtacgagtaattacatcgtgaaaattggtgttgtagccaccattattgtaatctaatccaagtgcctctgctgtagctatatactccgggccgttgagcatttgcagatgtttatacattgactcgaatccgtagttgccatcatatgatatttcgaaacctcgccccgttcctttcttggtcttaatctcaattacacctgaagcaccacgggaaccgtacattgccgtttcggtagcattcttcaaaatagtgaaactctcgatgtctgcgggatatatggtagatagcgtagcgatgtcagatgtcactccgtcaataattactaacgggtcattgccacccataatggatgtggtaccacgcacacggatactattcagcatagcgagcctgtcagtcccattagtggtgacgttcacaccggcagactgaccactcaatacatccaaagcattattcaatggtcccttcttgatattctcgggcctgatatgctctaatgatttagtcgccgaaatggtatcttgtttctctctgatattctgtacttgtgcatcaattttttgagcactacagatgaagaacattatgacaagacaaagactgactcttcccatcttgattcgttaaatctctgtagattccccagaccagacagttaataaatcttatacgcaatgtattataaagagggggattgggaatctgtactatttccctgcctgtccgtccgcttagccattgtatatttttttttgttatttcatatcagtgatgctgataatccaaacaagaacagagtaaacatctacctcttttatacataaatcctttccaaggactttataagcgcaaccattaactacattacattacaaatgtaacaataatttgtcatttgaagaaatttagaaaaaagaaaaagtcattatgcgtgatattttttatttaattacgacatttatcaaatacaaaaaatcatagaaggacaaaaatctttaaatgatttgattataaacaaactttaaatagttaaattgcaataatactataccatggttgttctttaccttaatgtaatactactgttatatatctggtcatttatctccttttgtcggatgcaaaggttgccaaacctcttttagaaaacgaaaagttcaagcggtaaaccatttggagcagtttcgtcctccgttggagagtaaacagctccaaaaccttttcttattcatcggcttggctgaaaactgcatccggcaacggagataaacgactgacgaaataatagcataaaacagcatagcccccccttaataaggcaattttatcaatgctgttttcattcttttcagaggactattattttcgacagagagaaatttggcaagcggcagatttcactccctcaaaaataatagatttgaattgctgtcctcttgcctttattggaaattgtagtacctttgtagtggcttgtgcgaacgagccaagcaatgtggaaagatgggaacatcgaaccatcaataaagtaccgaaaagagggaaaataccctctaccaccgctctttgagtgttaagaaataataaaaaggttaaatcttcaccttttagaatgtacccctaaaggttatgcccatatttctgacttataactcacaaaatattgagtaataactggttgcaaatactataatctttaaattgtttctgttgcaaagttaccctcctgcgtattcgctttgctgtatcataatcacggatagcattaccattttcatctgaattaccgcaaagcataccagaagaattccgaaattttttcgaacggtatcttatccatccggtcatacaagtctacatgattggctccgggaacgatatacagttctttcggttcgctggcttcttgataggcatcctcactgaaatagcgcgaatgtgcatgctcgcctgcaatgaatagcacggggcgtggtgaaatctctttaatcatggcaaacggatagaagttcatcaatgccgcctgactggtaaagcgtataccttgatagcgcggatgatagccacgcaaggggttgcgatagtaatcgaaaaactccttctgcacggcattggcatttcccagcagtttctccggtgtgccaaagcggatacgtgcttctcccgtttctgcttccttccaacgttgttcggcaacttcatccaacagtttgcgtctttgttcatccgtcatcgaatcccccaaaccgttacgggtggcacgccccatatcatacatgctcacggttgccaatgccttgatgcgggggtcgagagaagccgcacagacagagaacccgccgcttccgcagatgccaatcacaccgatacggttgcggtcaataaacggttgtagtccgagccagtctacagaagcactgaagtcttccaccaatgcgtcgggcgataccgtgtgacgcggttctcctccactttcgccttgataggaagcatcaaaagccagagtcacgtagcctcgccgtgccatttcctgtgcatagagtccgctacactgttctttcacagccccgaacgggtgtccgatgatgagggctgcatagtgttgcgcttcattgaaatccttcgggaggtacatttcggcgcaaagcatgatatcatacctgtttttataaaagaccttacggacagtaattgtcggatctgtttgaaaagtctttgccggttcatcggattcagaaagcaccattccgttccgacagcgtgccgccatgataagtacttcgtctatctgagcctgtgtcacgccgttgtgcttggcatgggcaatgtgagtattcaactcattcttcacgccgtccaacaccgacaaggcagccacagtagacagttcacgggtacgccagtcgagattgtcacggctgaatatgtcaccgaacagatgagctttcagaaattggtccaatgccggagcaaatgtcagcacttctcctagtgccggacgaccgaacagtttcagctggttttgtccaccgacaacaaacatatccgaactctttaccggagaaggctcccgtccggcttcatcctttatgccttgtgctgcacgctctttggtgagattcatcagcgtaaccaatgcacccatgctgcgtggaaagccgcaataggcatagagctgggtaagtacttctttttcttcgctcacggtcagcccacagtcaagtcctctggcaaggatcactttgaggctgtcctgattgccacgtgcggcatacatactgatggcggcaatactttgttctttcttgcttaacatattgttcttgttttgtgcctgcgtataaacgatacagcatatcaggcaggcgatggttgtaattaacttgttcatattgctttctgtttagtgatgaatttataagaacttgacaaacgccggtctttccagtcggatattttttcccgtattcttcagtaaccccgtatttcggtttctttcgaatatctgtatgcagttggcatccctgcaaaccactgccaaatagcaaccatccggagagatggcaaaacttcgcggataaagacctgttggctgaaatcctatttgaaccaatgttcctttttgggaatcaatggaataaacaattatgccatcttctttcaagtgcttggaagcatagaggaatttgccatcggatgaaacatggatatctgcatttccctctgcaacgaaagggtcgcagacaattgtttgtaaacgttccaacttgccttcattataggagaatacagttattttacccgagagttcactgatgagataagcaaatctgccattcgggtgaaaacatatatgtcgaggtcctgagccggaatccatctgtatgcggactactcttgattcatccaacagagaatgagccttacctgcttccggtcgtttgcctatcggaaacagatagatacaatctgttcccaaatcggtagcaagaaggaatttgccatcaggtgtaaaggtcacgcaatgcagatgcgattgttcctgcctttttttattcggcccatttccagcaaaacgaattatttttgtatcacgttgcaactttcctttcttatcctgtgagaataccgtgatgctgccacccttataatttgctgtcagaacaaagtattcctttggactgagagtaatataaataggaagttcaccgtctgtagattgcgagttaagcagagacagcagaccactttccttatcaaaaagcaaagcattggcagtcgaacttttcccttcatcatcgcctatggcataaattcgattaccagtgctatcagatgtaaggaaagcaggatttgaaatccctctcagcccacacggatagtcgacatcggcagtttgtccgtcaaaccggtacattctgacaccttcttcgtctgacttcatataacatcctaccaacagaaattttgcataagttcccttatccgggacatcttcggttgaccgcgcttgaatcgtagtgaagctaagccataagattaacatgacaaataaagcttttggtttcatcttatttacctttttggtttcacttgcaaaattacagcattcacatactgaagattagacctcaatcactgataaaattaccactttcatcgggcttggaccgggttaaatgttatctgtgaaaatggtaagacagtctgtgattagggttatatgttcgttgattgaatgaactaactttgtcgtcatggaataaaataaataagggatagaaaagaaacagctgttcctcagacagcaatgtcaatataaatacttatttttgtaaaaaacaaaaggatggttatgggagatataacaagaatagatacagttcagcagtactgcgaccttttcgaagtcgaagctctgcacccgttggtcagcgttgtgaattgttacgaggtgcagcccatcagacactcaaagaaactgtacaacatttatgctgtgttgctgaaagatactgactgcggtacgatgaattatggacggagcctctatgactatgaaaaaggctccatgctgtttatcgctccggggcaggtaatgggttctgacgatgatggcagtctgcaccagccggccggatgggccctgatgttccatcccgaactattgcgcggtacttcccttgcacatataataaaagagtattcttatttctcatataatgccaacgaagcactgcacctgtcagaacaggagcgcaaagtagtcattgaatgtataaacaatgtagcagaagaattgaggcatcctattgacaagcacagccgttctttgattattgataccatgaagcttctctttgaccgctgcatccgcttttatgaccgccagttcattacaagggaaaatgccaacaacgatttgttggcgcgttttgaattgttgctcaataattactatcattctgccttgccaacgagtaaaggtattccgacggtacagtattgcgctgaccaactgtgtctttccaccaattatttcagtgacctggtaaaaaaggaaaccggtatgtcagcaatcaagcatatccagcaaaaaattatggatatagccaaagagcgcatcatgaacacgcaaaaaagtatcagtcaaatctcagatgaaatgggtttccaatacccgcaacatttcacacgttggttcaagaagatggaaggttgcacaccgaacgaatatcgcaatgaaattataaaacaagcgataaactaactggtcttatcatcatttattcgtagagtctcttacaaataatactctggatataaccaacaaagcaattaatgaacaactttgaaatcttgaaccgataaacaaaaaagtttgatgatctcctgcatacacttttcccatcggatgaacagctgttgtccggtctttttcctgcggtaagtcaggattccgttcgcaatgtctccctttttcagataagccatgtccacaaaggacatcccccgtgtgtaaaagcagaacaggaacatgtcacgtgcgaaatcaaggtggggtttcagggacaagtccagtcttttgatacgcctgatatcatttaaatgaatggcccgtttcaaggtcttttccacacctgtataaacagacttgaacaggttccgctgtccggtcagtccgttctccaccgcacggttgtagaccgctttcagaatgcgcatgtagaacgagattgtattgggtgagttccccctgtttttcagataagcctcgtattccatgagcaagtcagagctaagttcgccaaacagtatatcgctacctttcataaaactgctgaaacttttgagcgcggctgtataggtttcagaggtccgtatctttcccaaacgtttcagccttactatctgttgccggatatagtcgttaaacgaaggttcttgtccgctgtcatggaaacgtatgacgatatcatccgctgtaaacggaccggattggcttaatgtcctgatagccttttccagtcggattttgtcccgtcttatccgttcccctaccgatagaagataattgtcccgttccatccctgcaggatgttgacagggaatgaccgcttcggaacgttggtcccattccgaagcgaaaagtttgtatccggtactgatctgcctgaccacacggttatgaatcacctgataatacagtgcgccctccctgccttccgcggacgaggacctgaatttggttctgattgttgccatagtgcagtcattttgaattgggattgtccagttgcttcctgatttcctgtgcctccctgaacagccggtgcgccagactgtccttgtaggctgccatttcatggttacggatgcggttcctgaccgagtcctcaaaagcggtcaccagcctttccacacgccggatcttttcctcgtcccgcttgatggtgaaatgcttctcaaggaaggcgatgtcgggatcatcccccggcaggcagatcctgatggctcggtatttcaaatcggcatctttcaaaagccggttcgtgcggtactggttgcagttggtccagacggaaatgatcagtgccaggatcagtgctgaagctgtcgttaccactgccttggatgcgctttccagacggtaggtcaccagtctgcgctccggttcctttttcagcaggaccattctctcatccagccgtctcactgtctcctttacagcttggcagtcttgactcaggcagtatctaatcttttccatctccccggcaaacgtttcggcagacaacggccagccttccgacaaccggacggtatggttacgtaccgctgctatttccaagccgtttttctccaccgcggattgcaggcgttccagacggattttcagttccgcaatcccttccggggaactggtccggtttccaactgcggggcttgtgccttccacgggcagcgtctccactttcttctcgatcctttcaaggcatccgtagatgccttccagataattttcctctttcatctttcaaagtttttttgttatacatatggttcacaaactccttcctttcctgcgcttcttctttctccgcaggcgttccgcctctttctcgtcctccgtcggtgccaccgacggcatgaacacgccacccgtaccggtgacttcgaccaggttatcaataacagaaccatgactttgttcatggtacggttgcttttgggaaacgtcattttccagggacgtgacatggttatggtccaatgccgcatccagccttgaccagctgaaactgcggtcaatcccacttcccttgaatgacagaccgttctttataaagcggatgccctgcacttcattagtgttttccttgtacttgaattccatttccacgcccatttttaagagcttattttgaaattctttccatgtatctgcactcctcaaagcttccttgaccgcacggtatatttcgtatttcaccttttcggaagcatgcagcttttccgttttaacggactgtttgccttcggaataggtgagcgaatacttgtccttaagcatttttgtcactttctcgttgcgcttgaaatcgttgctgtcggaaatcaccttcccgtcgaagttcacccggttgaagacgatgtggcagtgcgggttgtccgtcccgtgatgcctcaccacgatgaactgcgtgttccgtatccccatcagctccaggtattcctccgccagccttgccatgaacgcgtcggtcagcctcggtgcgtcctccggcttgaagctgagcgcaatgtgccccaccggtttcgccacgtccggattcagcaggcattgccaccggaaactgcgtgccgtctcctccaccgttcccagcagcacgccttccgaggcgatgatttttgcgtcgtccttctgcgtcacgtagcgtatgcagccgctgaacgagcggcctttcctgatcttccctatcatgaggctatcctcctttcggcctgtaatcatccatgatccgcttcagctttcccagcagcccctctatcagcagccttgtcctgtaaaagccggtctggtgcgagagctttgtcagctggttcaggttgttcgccattcccgccaggctgcgcaacagtgcgttctcctccggtgtatgccttgccgtaacggtggccgccagtgctgcctccctgatatagaccgccagactccggccggacttccctgccctgaacctgagagcctcgtagctgacgggggagaacttcaccgtcacgcctctggtcaatttacgcgtcctgcccagtgccggacggccacattttttcttcatcccattcacatcgtttgtcatatgttttttctttttcgtccgtacttctttcattccaaaatctgcgaccggcgggagcggatttgccctcccagcaaccgccgggcgcggggagcaagggttttcgggaatccggaaacatacccttgctccccccacagaaaaatcccccccccgcattttccacattgaagcgggtatacagggaacagtgcatacatcgggtatactccacgcccggtaacaggctgtcagatttttctccactgctcgatgtccccacggtaggcggcaagatgctccctggcaaggttctccagcagtccggaaacgctcatgccacgcccgccgagcctgcggacgacggcgtccagttcgtccctcacatcctcactgacgaacaccgtcttgcggttcctgatcttcgggacggtgaggtacgtttcccggtactcctccagcgaggccctgcgttgcctgccgctcgttcttcttctcacggggtcttccggttccggcggggtgtcctttcttctcgcctccccggatacctcctccgcaacgagcccggatggaatcatcgattccgtcacggaagcatccgtaccggcggattcccccggaccgggttccatcatgagtctttcccaccactcgtcgtggccggctccgggactacggccgttctttctgtctgcggtttcggataccgccattttcttccctttcgttttttcagtcggttcacttttcattgtacatggattttagatggttgatactgtgggcacggtctacccgtttgcccgattgtcggaagcaaataaaacgataataacaagtgctgtgaaacggacgggtccgattggcggggtttgccgtgttattcatattgttggatcagtctgacggtgatgacttcacaaatatacgcaccggaaatttcccactcttcgggaacggatctgaacgtctgtttactaaaagcaaatgaatattaaaatccgatttccatgacatctgatgacatataatgacatctgatgaaggggcggaaccatatccgggaacaatcatttactttgcagatgaaacaagtacgcatatggtgtcaaaggtagtcatcctgtcttgaaattcaggacgttccgccgggattcactaaattgcggaacggaatccggatccgaaaagagaatgaaacagatgtcaaacctgaaattacagtgattatggaaatagtgaacattgaggcaaggaccttcgaggcgatgctctcggccttccggacgtttgcggaccggctggacaccctctgccggctgtacggcgacatggaggagaagaaatggctggacaaccaggaggtgtgcctgctgctgaaggtcagcccgagaaccctgcagaccctccgtgacaacggcacgctggcatacacacagatctgccacaagacatattacaagcccggggacgtggaaagtatcatccggatagtggaggagcgccgcaagcgggctgaaagtatgggaaggtcgatctgaaaggccatgaaaaacgaatgtcgaacaaaaaaaagatcaagtcatgatgaataccgataaccgtctgctcacccgtgagagcagcgagcatataagagagttcttctccaccgtcgaacgtctctccgtttccatggagcgtctctttgccggcaggtcaccggcgatggcgggcgagaacttctatacggaccgcgaactggctgaaaagctgaaagtgagccgccgcagcctgcaacagtaccgtgacagcggtctgcttgccttcacccggctgggcggcaagatactgtaccgttcttccgacatcgagaagctgcttgacggctgctaccgggaggcgagaaccaggccggaggaactttagaaaagttccgtacgggatcgtgaatgaaggggcggtcggttgtcataccggtcgctccttcattttctttccaccggatgaacgactttaatttgctcgtaaaatacttatacacagagtgttttttctttatgaattatgatccggtgacaacattggcataacatggcgggacatggaaacatttttccgatatggcaataagatacggggattccattataaaaaaagactcttattttattatgtcattatgttattctgaaattggggcgggccgttcgtgtaccggtgggacgatccgtttccgtaatggcggcacattccgtactggtatcattatcctccggcaatgccgtttcccggtcttttcggagtgaccttatgccggccggtgacaaccgcatgtccgtgtgtaaacatggcggcgcataaaaacaggcacatcctccgggctcctgtcccgtcggatgcacctgtctccgtcatgtcatatacagccggactcctccggcccatgcctctatctgagtatcggattcgagagcagtatcttgtaataggccactccgccaatctctaccggcatcctcgccatcatgaactgcacgctcttcctctccaccttcgcctgccgcatgagtctctgcacgataaaccccgccgagaaccttgcgcatcttttatccttccagacaatgaacccctcgctgtcatcggcccggcagatgtaccagtcatccgtctcgtcgtcgtgggcgaagttcacccgtccgccaccgaggattcccaattcgattgacatcgtctttgacagatagacggtccccctgctgtcaaggttgatggtccgctttcccttgtatgtgacttcctgcggacgggagttttccctgttgtatactatcagtgccataactttcttacttttccgttaaacaattttttcaatacatgaagctttccaccgccagcatctgacttctccatgcgaaaccgctgtgggtacgtaccgcgtccactatcctgcatactttctgcgatatggccgatgccgagatacccatgcattccgccagtgccttgaacgagaactgcgcctcatagaacctgagcatgaacatccggtactcctcgtaggagaacttctgccttacgaaactcagtatgtctcttaccagccgctcgcacccgttcaggtcgtcctcggaaaggaattttgcctcttcgccacatcggaggaagaaatcatcttcagggtgtgcataccgattctcccttttaatctttaccagggccgcctttttgtagcatccgatgaaatacgcgtcatagtccgttatgtcctttccgggaaccagcacctgccttcttacaaaaaggtaggtgtcatggaaattgtcctcgtccagcattccgtaccggcgtaacgtccctctcaacctgtcataggatgcagtgaaccactcgttgaacagtctttccttttctgcgctcttgtctgccatagctttatatttttttgagttatacatggcctacacgggtaggcattcttatttcttgtgcttcctccagtttgtttttcggcggtctccggcaaggcttgccgtgaaaaaatacgctcacgcgaagcgtgaggaagattttttcacgtgcaaccagcccgaagggctgccttgcgggaccggcctgaaaaacaactatttttgccgcaagaaatgaggatgatggattccttccttctatctattgtctgtccggtgagaatttagattccatgcagcttttctgtctttggtatgtttggagaaatattcaaggatatgaaatgagaacggcaatacgtgatgttgcggaaggagcagatatgggattggaaacaggaagcgtgcccgggctttcatgcagtttatacggcggtgttgattttggggaggattacagggaagtgacaggaaagtcggccgttccggagaaattgtatgtgtacgttgttccttccgaaatacggagtcttttaaaatcatggaagacctcattcgggagtgtgtctcgatatttgcctgagacaaaattataagtcgcctattcatggataagtatttggaatatatcaacgacatgctacgatgcaataaagagaatcggaacggcagactgaaactcgcaatctgctgataatgcggactattctaaaacaagtgtggaaaacttgaagacatccgacggaaaaccttggaaaaagaagaaccggacaaagtctccgccttcaaaataatgctctattatgccacaggtgcggcattacttgtcattccggattggcttcccatgaaatccaccgcccgccatcaagaaaacggccggtgccatatggcaggtaatcgtagcgacagcctgtctttggaacccgttgtcaccctaaaggattttactgatatattattatgtcagtcctttttcaaatcaaaatacagcaaacgggttttcaaaggttcatcttgcggaatatcataatattgcttttctatcacgtctgttttatagagtggaacgaaaccgtttctttcataatacctgagaatcttttcctcattgtatgcatccaccacgataaaacggcatcctgtcttgttgtcctcatgacggaaccagtcttttatgaaagccatcagttgccgtcctacgtggcttgatgtaccctgatattccaggttgacccccagtcttcctatcagcacggccggatagctgcgtccacgtttaggatttacaatattgcgttgcagcctgtttttatcattgggggatattaatctggtcttgatactgtcattggacaaggtaaacaaggccacaatacgatgcgggatttcagtcgtcacccaacaatatgttttcccaaggagttcatccgcatacagatcggcatcattgagaaaaaaatcatcaaggtcattctcgccacaagtgaaaggaaggcaattcctccgtacttccttgttataggcaagcatgacacaatcatcatataaagaaataccgtccattgcggttaattgaaccggaatgaacgggatttctccaatacttttcgcaaccgtttctttgcctccactgataaccggggtgttacctttgcggcgttcttgtctgcactgcgtacgaaatcttccgccgtaacgccctccaaaaccggaatgttcttgatagttatagccataatattattttttgcaaaaatacaactttgttgttatacagccaaataatagcccgtcttccactcttttttccggaatgttcctccatatccggaaaagtctgtgtcacgccacccgttgcggtaagccgtttttctcaaggaaagggcaggcaataccggcggacgtggatatgggcaaaacaacccgcatatgcaatgcagagggagcaggagagccttcaccacagccggagagaaaagtggtttcatgccggggtacggcatgaaaagggggctcccggacagttcttttccttgtcgcacatgcactacgtcggtcgcagttttcgccttctgaatccctcttacgtccgtccctgcgctttcggagcgtttttccggcagaaaatttcgccgtacggaaattttctgccggaaaccgaagggaaaacgcggagtcccgcagggacggacgaactttgatgaggaaggggaaaatcatccgtttcataaataccatttcctcagatggcatcgcatatttccttctccatcttttccagcttatgggacaggatttccatgtcgctgctgatcttctggttggttatccgtaggctcggcaaacaacgcctttccgctttacagcggtaggttttcgcttacctgcccccgaaccgtacttacacgtctccatgtatacggctctccatctgtaacatcatcttacttgacacatctctggatttttgcgttacactccgcacatacaaccaaagtctttctgtgcatgtagagcattttgcgttcccagtcatttttaccttttaactctttgagtgtgcgaacatggtgcattaccacttctccgtgcttgccacatagttcgcacgtttttgttgtaagcctttctatcagactcaacgatggcgttttgaacatgtacggcagattgtcacttggggctgtttcacaatccgttttgcgggcatatccctcattatagaataccctgtacttggtttctcctcccttgtttacaaaaggcactgcaaagagattgtccttgcggtatctttcaatgacttttctcactgacatattcagcttttgagcaagagttttgtacatggagaacttcataatacagccgaaagagcgtcccaaagccgatgcattgtttgctattgagtaatagttgtagaaccctcgtatttcggtattaaactgagatacaatctcgtgcgcttcattgtcaatcatataagtcctgccttttgacacccatgtctccttgccgtgtttggtgacaactttcatggcttcgaggctgagcagcttgttcttgattacttctcttgaaacgtgtagtatcacattcccgttgaagtatctgcgcactgttccgttactgtttctctttgtggcatagtctttacggacatatatttcgtaacccaaaaattttgcgctgtcttgtgcatttgtaatcaaagtcttttcctgtgacatctccagccttaacttttcctgcataaacttagtgatgtcagctttgattgtctcacattcgtttttcgttccgataactccgataaggaaatcatcggcatagcgcacgtatttcaacctgcgaaagtttacatccatatcattgccacttggcattgtaagtatcagcttctgcttttcgtgcagttcttctaccatccttgttcttacgtttacatcctctacttcatttatcctacgttttaggtagtgtactctgctgttgagtttgcaaatatccttgttgcggcttcttgctgtccctttattgaatttgttggcatattcatccatgtacttatcgaacttgtctaggtatatgtttgccaaaatagggcttatgataccaccttgcggtgtccctgaataagtcttgttgaattgccactcttccatgtaccctgcattgaggaatttccgtatcagacgaagaaatctgtcgtctgctattctgcctttcattatttctatcagcacattatggtctatgttgtcaaagaagccttttatatctccctcaatgaaccattttgcaccgttgaaattgttttgtagacttttcagtgctgtgtggcagcttcggttgggtctgaaaccgtgcgatgtccactcaaagtgtccctcatatatggcttcaagcaccattcttactacctcttgaaccaatttgtcttcaaaagacggtattcctagcggacgcatcttcccattctttttcggaatgtaagttctctttgcaggattgggactataagtctcatcctttatactctctatgagtttgtttatcctatcaatgctcatttcatcctcagttttgccatctgtgccgggtgtcatgttgcccggctttgcatacatacgttggtaggcgacaaagaacatctgttcattgaatagaatacggtaaagcctttcgtatttatactcgggctcattgctgtgtccagctaaaatgtttaatacttgctctggatttctcatacgtctctcacgttttccgttgtttgtattaaagttacagactacttcccttcgccatgtacaaggctttcccttgctcagactactacggaagttccgttaccatatcggatattcaaaagctttctttatagctgtttgttccagcgttccgacttaggtaatccccagttagttctcttaataactattagcacgacatactgtcggatgtgactttcgttcttgtccgcttattgcggctgtgtcatagtcggttctttatgctctgcactaacgcacaaaataggcagagtactatgaaacaacgtatgtataatagtcttccgttgttgcaagatttggtaccactgaactatcattcaaccaatcaaggcttcatccttatgtatgtcttttcgtcttgcccctcagtcgccacctgactattagtggacttggagctttaatcagtatgctacactctccatcgggtttcccttttggataaactgattgacgataggactatatcgaacccaatcctaacttcttgctaaagaagtatttattaagcgaccattctgggcgcacgggcatatatctgggtggttttcaaatccgtatgccccaaaagacggcttacggtctcgatgggtacaccgtgcgagagcagcacggtggtggcgttcgtatgccgggccacatgataggtcagccgtatcttgaaaccgcactgcctgccaagttccttcaatatggtgttgcatctgccgttgctcggtaccggaaatacatgaccgtccttggacagtcccttatacttctctatgatgcgcttgggcacgtccagcaggcggatgttggactcggtgtttgtcttgcgacggcgggtgatgatccagaggttgccgtcgaagaaggtctggagccggtcggtcgtcagtgccttcacgtccgcgtatgccagtccggtgaacacagagaagatgaagaggtcgcgtaccagttcgcaggtcccgcttttcaccggggtctccatcaacgtctgtatctcacgctccgtcaggtagcctcggtcaacgctctcgggggaattgatgtacccggcgaaggggttgaagggaagcgcaccgctgttgcgggcgatggagatgacgtgcttgagcccgatcatgtaaccccatacggtattggtgcggcatttcttctccgtacgcaggaaatactcgaagttgttgatgaaggtcaggttgagttccttcagggggatgtcgtcacggcggtatactttcgggacgaactcgcaaaggtgcctgtatatggtacggtagcggttgtatgttccctgcacgcggctgtgtcccactttcttgatgaactcctcgttgtgctgctcgaagagcttcagcagcgtctcgcgtttcacgcccagcccgaggcaggcgtccctcagcctggcggcggtgacatagccgtcggactgcatcagttcctggtaacggcggttcacgtccacgcgtatccggtcaaccgccgcattgattttctgcgcctcggcgctcttgcccgtggcacgtgccgttttcacgtcccaaagtttcgggggcacgtccagcttgcagctgaactgcttgatttcgccgtctaccgtaagacggcacatcagggggagatagccgttggctctctcgctgcccttcttcacgtagaagaggattttgaaggtcgatctgctcatactcgttttcatacttttttgatcgttacaaagttaatatcaagcgagttgtcctcaggtatgaaaaactgtgcaaattactgaaatagaatctgttgtgccgtttcttgttcctgttatatcagtaacgatatgggaactgaagtctttcgcagcttttatcggacctcctttttcagcttatgcagtattatgagttaaacacctaaccacttaatagactgcatttttgctgtattatcatcaaccttgctttttctttctgcgtttactttataaatgtgatactttgggtgtataaacaaacgcagctataacatccatgggaagaattggctttactacctgatattctgcttctgaaagatacgtacggtatcgtgcaaacgaacgtaccaggttatttgcccgttctgtggcaatgtcgtcggtgtgtaggcgtagtgtcgcttcattgttaatccattccaaacggcggttgaagatattgcgttgagcagctaagtcaatattaccggttggctgtgaatccaaaaatagattttggcattcagcctctgaaatgaaatcatgattgtctactttccccttatacccaaagaatatcatttcctcaccaaccaattgattatcgttgtgttttgtctcgctaattacagatcggactcgcataaggagtacggtagtaaccatatcaaccttgtctgtctctataaccattgcacggcaagctcccaagtttccgccgttgattgtatcattgacaacactccttgaaagatcttctacgaaagtgtgattacgtccaatatacatgtagtttttaggagtaggcgaagcaaatgaaatccgcactgttccttttttatctaccgtccgttgaaagtaggatttcaaattttctggcagttcgataaattggaaggaatagcacagtggaatactatccactttcacattgataccggcatgtcgtaattctccgataacgaaatcccttgtatcgtaaatatcacctataacctttttggcttcattcagactttcaatcaaccgggtcggatccattgctttcgtattatgggcaaagtaggtatgtgacttcttttcaatttctacagctcgttgaatacgtttatcatgttcttcaaccgtttctgaagcccactccatatcaaaaagagtcggctgtttaataaattcctttttcgtgtcgagtacaataatctcttccataatactctccataagcgtagaatcattatcggcaattgggatgtaaatacctaatgattttcgaatctgattttgcttacgataaagtactttcatgatgattttgtcgacaggattcgtgtcttcatcaaagagcgtaaaaatcgcaacttccttttcagtctgtccaaagcgatctatacgaccgttacgctgttccatacgattagggttccatggtaaatcataatgaataacacaattaaaacccgtttgaagatttactccttctgaaagacaatcagtacatactaatacatggcgaggtgctttagctaattcttcaatcttcattttacggtcttcatccgtaagtcgactggttatcacttcaaccgatacatctttgtattttttattgccagataaatgtttggctatatagtctttacaatattctgctgtctgtatatattgacaaaagactattggagcatatccagaatttaaagcaaattcaacattctttgccaattctgtaactttgctatcttgtcccttttctttgatttctcgaaggattgaaatgaatgaacggaacttgttcttctcactatttgatgattcctcgtatgattcaggaattacatcatcattgaaaagcccatcttttaatgcatcattaaatttataaatcttgtcgttatcttctgctacattttcagaatcattagagcgtttgtttattttgttctgtagcatgctaatacctgcatctggacttgacatcacacctctgataagggccaatagatcccagtaaatatagcgttgttttattttacctaaagaacgtgcagctttgacaccttcacgtacatagtctataatgttcataaggagagcatggtactgagcacttaattcatatttggcatcaaattgaacgcgagtaggaaatatcatatcatttcctacataaggtttaacatctgcacgacggcgttggataaaataatgtgacagttcttcacgttggcgagcatcttccaatgtgaaatgttcaaactcaggttttaagagcccgataagtgattgaaattcctcattatttccactatgaggagttgcagtaagaagtactatatgcctttctgatttagacaaatcagaaagtaaagcatggcgtagctgctgactcttgttggcacctttgggcttagcgcaagtatgtgcttcgtccactatgataaattccggacaatgttgtagaaacattggctttcggtctgaagacttaatatagtctatagaaatgatttggaagggtatatcgcggaacacattttgattggcacgcatattcttttccaaacggcttattgtgctggagcggataatttcggcttccagcccaaatttatcgcgaatttcattctgccattgctcgcataggtgtggcaaacatataatagcaaaacgttgaatctctttgcgatccaaaagttctttagcaattaataaagattccaaagtcttacctatacctacatcatctgaaatcagcaaacgtataacctggtgtttcagggccaatatgaggggaaccatttggtaggggcgaggttcaaaagaaagtcgtcctaaacaatggaatggtcctgctatgtcacgaaatgataatcggcacgcattataaagaatacgtgctgcctcaggataactattcgctcccacatcatcagatgagggcttgcgaaaatcatatgagcagaccattgaatttagttggtctttatataatggcttatacagaccgataacttcggcatctgtaccacctaaaggttttataattaatatatctttatctgatgactgttgaaccacccatggacgtgagcgaaattcaacaagtgttcctgttttatattccatctcaattaacttattggagtaaatatgtctgaatgtgcagatacgaactctgccaatggcgttttgtagtaccaaacgatgactacatagccggcatcttcaagcacttctcttttctttctatcatcttcctgcacttctggtaaatcatggggtgtaccatcacaaaataccacgattctatcaccatatatgaagtctggttgcacataatatttttctggaaacattggctgggctttatctggtagacgaagcttatgctcatataaatattttaagaattcgtattctgtgctgctattatggtcacgggttgcttcgagttcctcatactgtttatcgtagctttgaagttggccagcattgcgcacttctatatcagcattcatcatgatagataatgtattatatatttttctaatatcaataagttgatgatatggctgattgtagtaattaagcaaattagtataatctgcaggaattaatttggcacgctcttcctctgagagtggtgtagttcttccataacagatttcataagctcgttttactactgcgtgataagatgcaggctctaatactaagcgttccagtgcacctaatgaaccttctgcattttcgtaaatgagaagattggggactttttcatctcccattacatcggctcctatttcactaccttctatttgaaagacatcttctattgcttgcttaaatgcatacaagaatgtacgaacagctcctttatctgataaagcaagcgtatcaagaggctgaatataaatagcatttgcagttgtctctgtaaataacttgacgtacttgatactgtttggctcttccggatgctgttgttgtttttgcatatgaattgccatacgttctgcactaatccaatcacctgtttttgtatcaaaggcaaagccatttgcattgtcgtcattttttgattccagaatataagtcaagcggcatgaggggatgtaacgaatattggctaaatgagttccattattagtctttagttcgcacatgcttattgcacgagtatcatctgaagagaaataggtttttaattgatagaattttcgacttcgttcttcttcctgacacgtaattttttcgctttcttgtgctaccatgtcttgtaattgtatacaatagcctggtatcattttagagacaccatcaagactctctcctgtgattatatctgtatgatgtgaagcattctcttgatttttgtaaattactcccgttttgggattgtagaaaaatttgttaggcgttacttctcccgttaacatcatgcgagatacacggaatttgccaccatcattgtagatgatattttgaggaccaaattctgttaatgccaatgattttgcccggctaagatattctaccttatcgctatttttatattgcagtaaagctctctgaggtaattttgtaaaattatatcctggcaagaatccttcgctggcaaaatatctgtaagggtagaattcgttctcttccgcatttttcccttgattttgtccgagaagcatatcgcgaagctctattcctcgtctttcctttaatagtgcctctttcttttccttggaattttcaccatatatattatttctggtaacagtttgtgcttcttcaatctgctgttgagctaatttatataagctacgccagcggttgagagctttgtcaaaatcatataaataactatccaaaatccggtccatccaactgtcagagaaccaatatggcatttctttgtcgattctactagacaaataatagtctgatatagcttgcttaaaaatggctttaatctcttgttttcgttcttttgaaagttggagatgatgaacaacttcgggttttaacgtgatgttatttgcattactataatcaaccaaatctgcaatcccgttagataattgaggaatggggcatatggataatatagtagaatgcaaatgggtcgagaataattcttcgttaaccaattccatacgtggtgcttttacctcaccactcaccatcttttcaggatgacgaagataataattttcgtgtgagttacgtgtacggcagtaagtatagattaaagctgcttgaccgctacgtcctgcacgaccagcacgttgagtataatttgctggagtaggtggaacattgcgcatacccactatagataggtctttaatgtcaataccaagttccatggtaggtgaacagtatagtacaggaaactctccattacggaattgctgttctcgtttttcacgttcatctttaggaacctgacctgtatgatctttcgcttccaaatttatattggaaagcggaatatttttatagaagttctgaaaatagttattaggggtataaacaatttcatccccaatagtcctaattcttgtaagatctgttctcacatttttttcatcacctttttcccataaaatgcttgaataaaataattggtaagctccgtcattttcttgaatgtaattacccaatgcagcaaataaagattgcatataggaaacataatcttctgaattacggattgttgcagtacctccatttatattcaagaaatcgcgaacaaaaaatgccaatttagagcgatagccagcgacctcttttccaaaagccttgcgcttattctgtggttttacaaagcataatgcatgtgaggcagtaattctgtcgttatcgtctaatgtccatggactttttagattttctctaacttgtttctctatgtcttttgcagcctcttctgttctatcatcagaatatatgcacaatttgtgacgcatataatccaatatttggatgatgaagcgttccttattttcatcagataatccgtctaattcaggtatatcatagagacggtcgcaaccattttcacctgtaatttcgtcatggagatattcataattaatcttcaatagtgcacattcttcaagattgggcatgtttacttgccagtttccagccagatcatcgtagatgatagttcctaaatatctttccattacattttctactttctttgcacgccctccagtccaattagggaatcggaaataatcgttatgagaaagatgaaggtgcttaaatacgagtctagcaattctatcactaccaataggctcatctgcttcttttacagcattccaaatggcagagcgtattttacctatacgtataaaatcattaaaatggccagattgtagggcagcatcctgacgagcatccacaaaagtcatgactttacagtctgcaggttctacatttgcatttctcatttttatgacattctcatatgaaagtacggttgttgctgtacttctaccttcactaccaatttttgataacttagaccattctttacttgatcctgaatagatagcttttgccgttggatcatacttcagtggacttggcacatatattccttcaatacactcattattaacatcttgagcttctgaaaggttcccatatattgtaaaataaactctttttgggaaacgatctaaataagttttcttaaattttcgattcccatttttatctatagtgtaccagtcctctggaatatcatctgaatttggatctaataagaaatcttcaacagattcattcttatggggaacgataatataaccgttgttgatagtaaattcttgctcttcttcatctaattcattacgctcatcgtaatttctgggtagaagagtgtcgtttataatttttacagaatacaattcatgtccgcttaaacgactgaacatgataggatagtattgtactttatgctcattatcagacaattcttcacaatataatttttcatcaactgtaatgtaacggttttcaggatttcctaatgttgcatatacatttccggtctgaggaataaattgatggattttataaggtaatagattagccccttgattaatattaatatcattacaccagtttaatatatcaataatgtgctgaatacaaatatttattgagacttttctatcaatataattatgtaattgttcagctattttcctaatagaacaaggagctcctcggaagtacttttgttcctgtttgtcaaagcgcagcgcaatgttctgctcaatccaattggctgtaggatgattacggagcatatcagcatttaaatctgacggaataggagaatttatagctgatagtatatcctctttagaataatttgtattggataagccaaccttcaacgtttcatctacaacttgattaatatcataggagctgccaaaaatgcaagaagcaacttctgcaaccttttgacgctgttctttatagctaagtctatcatctgcaaccattgtggcagatgttccaaaacataacactggctttttagcttgtgcctttattcgcctaatcaaaaatgagacatcactaccttgcataccacgataggtgtgcaattcgtcaaatatcaaataatgaagattctcaaggaaacaatctctgagccgtttttcatcgccagctcgagtcattaaaagttccagcatcatatagttggttaatatgatgttgggaggcgtagtttgtatgcgttctctaacttgtgaatcttcttgtcctgtatatttggcaaatgtaaacgggcattcttttcctgttgcattttcatactgttgacgatatctagccaactcttcggattgagagttgatgagcgcattcataggatatacaataatggctattgttttattgatagaatcttcttgatgttgtagtatataattgaagatggtagccataaatgtacgagatttgccagaacctgtacctgaggttacaataaattctttatcttgacatcctaattctatcgcctcctgttggtgtttatagaagggattcttaaaaaataatcctaagtctttatgaatagggaagccatttttgatcatttgactgacatcgattccagacgcaaaattaggattaaactgaattaaggcatccggccacaatttttcacttttaatggcctcactaacctcttttcttatccgttcgtcttttatggaaacgaaactaccgatatattctttatagcttcgttttatttctttgtatatatctaatatattcataatttgtatataatcgttctattgttttgagcttattaacagttctcgaatatcgacttctaatatttgagatattcttaataatgtttcaagacttggttgggaagtgtttgtgcaccatttggacacagtagcaggatctttctctaattgcttagctagccatttattggttcgctttttctccacaagcacaaccttgatgcggtttatgtctttttctttttccataaggattttctttcgttctatgcaaagataagaaagcctatctatttttcatcatttcaataggactatttgtaatataaattgcgaattagttcaatattatagctatttatagataacataatttctttttggaatagaaatctgtatctttgtaggtaacaatgttttgatatgggcaattgctgatagaaatagaaaaatatatattaattatatggaacaaataataacaacaacagttgtaactttaatatcaggagctatcggtgccataattggtacttacggtggagcgttatttgctgcaaaaagacaagaaaaacatataaaagaacttagacaagtcgctataaaagctttaaaaatattccaaaagtatgctcgtaatagacaaacttacgatgttgcagcttctgaattcaataatgcattaagtattgctgagaaaagagtttttattgttgcattacataagttgggtatccctattctggcgactccagattctaagtttgacatacaaaatattgtatttgaaaaaagagaaatagataaagacgaaatagaagctattatcagccaaatacaattaggacattgtgatcagttattttacattgaacctgataattattttagtgaaaacattcgtttaaaaacattacgttatattgccaaaagatgggtaagagaagtttttggtaaaagcaaacttgatcgttctcagaatcctattgttatagtttatcctactaattggtggctagattatacattaggggaaaggttaggaattgcggttttaagagaacgtatatctttagacgaatattttgatgaacaaggcttgcctaaggaagattctattgagcgtttaataacagacatagatcgtggtctatgggatagtagcttcttttgggatatagaaaattatcgaagcgtaactgcaacaagttctcttaataatatgatctctcaattattaaacaatagtcagaacagtacgattcagaaaagagagagataaaagacaaaaagtttgtaaaaaaagcaacagagaggattttcctctctgttacgaaaaaagctacacctctaattccttcaacggtaacccataattatattgtccgaaaaatcctctgtggataagtttcaggccaagggtctgataatacttgtagtcatcatcctcggtgcagaggtatttgtaaccatagcgtggagcgtactccttgaagaagcgggcaaggtccttcaggttttcctgttggttccgtttgaagttgctgcgcacaatgataatgctccagtcggggatgctgccaacgccgcaactgtattcccagaaacgaatgtataaatccatttcgcctacatggacagaaacacaaataccgttggcgttgtgcatgacggaacagcagtttctgtaaccgaatctctcacacaaatagagattgaaatcgtaaataaaatcggaatagttcataataatttgaattttgatggttaataaaaaattgattatagactgaaacctcgcttacgtttcggtttctttttcttctttttaagccgattggcctgtatcgcttcctccgtatcataatccgtaggagagggagtaaacagtcccagactaataccggaatgattctcctgctgatattcatgccgaggttcctcgcgtatggtttctgcctgtgactgacgctggttcatggtagcagaaagagcgttatatctcaattcctggtcgatgttcaggaaactgaactggcgatcaatctttgaaccgctaaaggtcagttggtcacatgtgaacttgacaccttgcatctctccggtcgtgcgacttagcttccattgcgtatcaattccgtacttccgtaaggccagtcgcagctcactccagcttcgggcgttcggaacctctcgtttcaaggcatgatagataaaatactttaccttgtcatgatgacgtaaccgaatgaaattgacatgctcttttccttcggcaaaatgcaaacggtaacgggctgtcagcatcttgcagaccttttcattccggtagcggtcgttcttgtcgctgatggtgcgtccgtcattatccacacggttgtaaacgatatgacaatgcggatgatcacggtcggtatgccgggcgatgatgaattgcgtgttcacgattcccatcagcttcatatagtcatgggcgatctttagcatcagcccatcatcatcacggatgcgatccccgtcctctgcggagaagctcaatgatatatggccgaccttgttcttgaccttgtcgttcagtaaagtctgcaactcgaattgttccgctatttcttcaggcgagccgtagacaccaaccgctttcagcaggcgcgatttatcttctttcagcacatagtttacgcacccggaaaacgatgtacccttgacaattttaccgatcatccttgagctgttttatgagttgtgaaatctgttgaacggcggtactgcactcatcggccacacgataaaaaccgtaagcattggctcgtctggcaagctggttcagatttgtgctttcgccaatcagttttcggatgatgtcaagattttctctcgtaatccgttcgcgtaccgtaccgtgttcgatgagtgaacgcactacttcgctttgactgcgtttactgcgtcggctgagtgctctgagccagccgaattgttcgtctgtaagacggattgtaactgtatttttcttgtccataatattcgcttttgagattaataattgtgaccatcgggagctgtctcaccttcttttgaggtgagcaagtggccgggaaatgtaatacaccggcataaacttgctccagtgaaaaaggagtgaatcagacatctgacaatcatcgtttgaaaagtcctttccgagtatgttgaaccgttgctgaaagcggtgctttctccacattgacaagctgtaaatcaaaagtctctaccagcgttttcaaggccggattcaacgtgataagacgattaagaatagcttcctttgtctcttctctcagcagaaaatctgcaatgtcataacctgcatcacgttcttcttttgttgcgtttctttccataaaatcgaagagagaaacttctattcccaggcttcggatcatctccattttactattccaatagtcggtcgcacccaggtcgggaaaaagcagaacacgtcggtttctcaatacgctcatggcatcccgattgaacgcaccgttctttccgcccgaagcaatccatagatattgcggcagatagaaactggatatcaaagcgcttttctcactctccacaagggcaaccggacgctgttggtcggaggacaaaaggtgctcaccaaacaggcattgccggaggttgaaattctctttcttcaaaatggaatgcacccacgtgatgtagttgtgcggctctttaatccgtcttccgttttcaggattgtagagcatcacttttccggtgcgtacccgtccggaaatatccacctgccagaagactgtagctcccggccaatgtttcgaggttcccacatggtagcgcaacatcagttcttctgtagcctcctgcccgaaatgaaaactcagaaactgaaacagcttgttcgtgcgatacaacttcagggactgcctcatgatttccggctcaatgaaggatggtgcaggagacagactgatgcgtggctttgacaccggtacaaactcttcgctcaatcgttccttggccatcgggttctcgtcaaagtacattttgggcgtatagttgtagccgcacttctgttcatggttgcatcgccctacatagtcaggaaagctgatttgtttttccgtatcgatgtatttggcaaaacaacttttgcggtggcagttcgggcatgtgtgccgggtgctgacacctttgtatggttctaacttgaatctgtagttcatttttctttctgtttggatgttactatgcacattttcgcaacttcacaaacccctcggttgcgaaaatgtgcatagtaacaggtttatttactgtattctccatgattctcttttctgaataatgttccgatgtgtcgttttagaaacatcttgaaagcatgttccttcatcccgtaactttcggcaatgccgataccttctgccgtcgtaaatctctgaggcaggttcaggtagatgttgcggtgcaattcgctcaactgttcctggctgacggcggtctgcacttttacggctgtagtccgaaaatactcggccagcaggatggcacggttcacgctttcaaggtcaatcgtatgcttgtcgcactctccgcaagtccatcgggcaagctggataatcagacaaaaccggataatgtagatttccagtttgcagtaaatacctaccaaagcatcattagtttccatatcacattggcgtgcattttcatgctgccaaccgtaaagccgttgcttggcgtcttcatcaaatggtaggcattggggctgcaactcattattctcatcgcgcggacaatcctgtgcgatgagcttgtcgataatctgttgccactggatttccagttcttcaggagtttcccggtcgttccatctgcttttcaagacagattcaggcattacgaaaagaatacggtcaataaaaccgttactcgaacgctcgcctttaaccagttcgcccaaaatcttcttttggatggtaccgataacagagatatagggacgtctgataaaaatggaactttgcatactcttgcggtcagaaatcgttggcttggcattgaacactgaaagccagaattgttcttccgaaccgttattgtagcggttgaaatttttgaaccaagccgagagctcgtccgaccaaaggcagagtcctctgggattctgggcatgtatcaggctcaatccttctggagtgatatccgaaacaagaaagcgtctgcgcacgggagcctgcggaaactcatccaaaccggcttccatgcgttcctttttgctcatggacatagtgcgttcatactcggcatacagtttctgatattcctgattctgacaatagtcgtgctcaataaacggctggaaagcgaaactcagcggatgactcttattggctccggggcgtccaatcagtgccatgtacagaatgggactttccagccagttgcgcttcacctgcaccagatgggagttgccaatccccacggcaatggccgcaaggatagccgcagcaacataatccacgggatagccctgacaatcgtgcaaactgctgatgatacgctgaatcctgataggaaagacttctatcgggaactcaccgccggacatcttggctccgatgcggacagcctcgccgataataccttctgctgttaatttggaggtttccatagccgtgcagatcaaaagttataacctccctttggtttgcgcttcgctccatatactatctccgctgcctgttcctggagcgatattgcctgcatctgcttgcggccggactcaatccattgcagcagctcatcttcatagaagtagagttttttccctcgtttgtaagccggaatcagtcctttacgcgcaagcgtgtaaatggtaggctttgcctttcgtgtgattttacaggcttcgtcaatttcaataagacgatgcttgtctaaagaagtctgcggttgtaatgccgccaccatttgccggatttgttccatctgttctgtgagataacctaccgcctgcggcagcttatcaaatgtgatttgttcgtttgccatacgtactcgtttttaattgttcgctggcaaaggaaattggtgttttgatggtggaaaacatcaccggaatataactgtgagataactttgcttagtcattattgatgatgagtatatgaaaatcagtcatgtatttttattctctctggaatgagtttttgaagattgtgcgtaagagggaatatatgtctataaaatatgggatgataaattgtatattatcaatcattctatctgatgaattttagtaactttggagagaaatactaaaatacgatagaaatggggaacaatttgtattggaatgtatataagtcacttgagcgtgaattattatctttagcagagattattcacatagacgatagtcaacttgatgtttattcaatgaagattgcggatttattaattcgtacaactgttgaaatagaatctatatctaaggaactgtattttagagaaggtggtacaaaaccagacgataaagatttatactttgatacagattgtttggctctattggaatctaaatggagtttaagcaaaaaagtagttatggtttcaagtccaatattatatttggaaggaaatgataatatatatttaacaccactacataaagcatataaaagaggtacaagttcttctgattggcaaaaggcataccaagcagtaaaacataatagggcaaagtcattaaaaaaaggaaatctaaaacactttatacgttcattaggagcattgtttatattaaatatatattatcaaaatctatcttttaatctaggttcaaatagcaacggaaacctatttgatgcaagcattggttcttcaatattctcaataaaattgtatcctttcccaggcattgatgcatcaggaatttataagaagaatgaagattttgaaaaatgtatctatattattcaagcaacaaatgaaacaaaagaattagctagaaaagcattggaagatttgaatgaaaaaattcttaataaagcaatatctgaaacgcagaacgaattatctcagatgacggaatcactaaaggctgatgttttgcaagacaaaattataaatctgattaagaaacataaggacgaatatactatagctgttgcaaaagaaaatggtgcaatgctagctaaagtgtttaatacactacgctatgaagtggttttgaatataaatcaatattaatcatataattttttgtataatttaattctacattttgattcggtattagacattttacgctcaatagttgaaatctccaaatcgcaaagagtgtgggcaaagacatttttaataaatgtagctgtatgaatacgctttataccaaaagctttgcctatattccaaccaaagtgcataatatcaatactttttagttgagagtcaacctttacaggcgatatcttttgtaaggtatcgcctgaactatattctacgatgtatgcacataaacggttgagatcttcttcactcatataggcgaccattgtttgcttcgtatagctgaggaccttttccaatctggtttgagtagcacgattcttttttgctatagcgttggttcgcataacttcatattctgagggttcagagattgtttctttagcggtaggatctgactcaatgatatcagtcgtagcttggtttgaatctttgattgtaggggcttcaggaacagaaacggtatcattgtaatttttcatcgtttgaaaagcagagaaacgcaatagaaaagcttctatgcgtggcagcagaaactgattgaaagttgtctgtaaactggcatagattgccatcaagacaattactgttgcaaaaaatgcaacactactactgaaatcgtcaacccccttggataaaacatactgacgaactaaaacgccaacaacaagagtacctaccaatacaagggaataaagtattatatgttcaatacatttctgattcatagtgatatttgctaatcgtttgtgcgcaaatatatatcgtttcattaataccatactataaatccaagaaagtggcagcatttgtcctcgatatggtacttatttctatgccatctatgccacgatagaataaaaaagaagagtccgatatggggtcaaaacctagtcggactcttcttacgttatagaactttatactatttcaacgaaatcttattcgccgtctctcgcttctttgaattaaccaaatcagcataaatttgtgtcgtggtgacattcttatgcgtcagcatcttcgatactgtgtaaatgtctgtgcctaaagagatttggatgaccgcatacgagtgcctaaagcagtggaaggttatgtgctttctgattccggcttcggaaatccattgtttcaagggatggtgagtcatggagcgggttaaacctttgaagacttttccggtgccccattcgccacacaattccagtgcctcctgactgatggggagggtggcctcggtttccgttttctcggtacagatacgaatgtaatagccttggtctgggccgacttcaaaatcacgccagtccagcttcagaatatcactgatacggagaccggtcatgcaggcaaacagggaggcctgttttaagacaggaatcttgcagggtgtagctgccagtttcttgacttcatcaagtgtcagatactctttcttgacctctttccattctatcttttccagaaagtcgttcaagttctcgcgcaacatcttctctttataggctattttcaataaggcacggaaagtcgaataatagccggctgccgaattgcgtgagatataagcattgggatgattgatttgtttgcatttgagcaggtaatccctgaacttctcgcaaagttctacggtaacgtctccgaatgtgcatttaccgccgacaaatttctcaaagtggttgtaaacgcaatcccatttctcatatttttcccgtgcctttgtccggaagtaggcgaggaaatctaccttttgcttgttcttgtccaagaacccgaattcttcattgataagcgactggacacggatacagcggattgcctctgccttgttcagcatatcctgattgaacattctttgctgctcgttcttaggcttggcatagatgtagataccgaggaattcccggcgactcatcttcatcgtataaggattgcggattgccggataataatccagataaagagatatgcggtcgttacgcaatggcttttgtctcaaagttacgttggtgcatgtaagtgtcatagctatattgttttttgattaatacttgtttttgttgcaaataaaataggtgttctaatggtggtatttatcaccggaaaataactttcggctcattctatctttggaggctcaaagaacttgtccagctctgcccgcaggatcttggtatatttaccgaccttgatacggggaatattatggtatttcacataatggtagagttggtcccgtgtcagattgaatcgctccattgcttcggcaatggtgtagtatttgggctcttcgggagctatgagacctttggcaatgtccacatgcttcttggagtagtacaccatgatgccgactttctttttgggaatggcattctttgatacaaaagaatagatggccgttagtgtcatgccgaacttctcctgcatgtcttgtgtgctgtaccattccttgatttcaggatcgggagctttctttgcaaagtaatcatcaatatgctttttgctccaataggtttttccacggtgaaaggttcgtggaatattatgttccttagcgatatgaaatatccaggaatcctttacgccatacttttccttgacttcagctgtggtgtagaaatctgatattggagttttctctttgggcttattctcattattggaagcagtaatgtagtcgaacatcttatcaatatccgaacgccgtacaagagttttcccatcaaatctgaccgctttgattttcgcatttttgatataccgataaactgaggtacggcctacacctaaaaatgcggcaacttcagtaggggttaagaactctttttcagaattaggttttaattctgcatcgtgtttcaagtggaattcttgaatccgtttttttctaactcgatctttgtatgcgaggtttgcgcacctgtgtgaacagtatgcggtagtgatcttgtgggcggtaaaaatagtgccacaccactcgcatttcttttgaatttcaatgttactagccattttaattatctttttagttcgccaaatctgtttcattgcgtaccacagcgttccaaggcgttccaggttatccactatctggcaagcagtaaaccctgtttttggcttgtgaggtacacaggaggtacaaaaaatggcgtaaaaaggcttagcaacgattatcaacgatacttgagcaacaaaaaaggcgccccgtaaagagcgccatatcaatcgattatagtcaatttaactcattgataatcagatagttatttgccgatgcaaaaatgttcaaaaatattcccaagtaccatgtcgttcgtaacttcccccgcaatatcgcttagatggaaaatacattcgcggatatcttgtgaaacaaaatctccggatagattttctgctatcccttgttggacccggtggatggcttccaaggcatgggtcaaagcctcgtagtggcgtatattcgtgacaatgacatcgttttgggtaaccgtgggcaggttagcggcagagattagcatttgctgaagcttgtcgaggttggtacgccctttggcagagatggagatgcattgcacattagtagcggccagggtgaaactgggggtgaggatggttgaggcatcctgcaccagatcggccttgttgaatacgagaatgagccgtttcccttcgcaacggggaagtatctgggcagttagttgtggtatccgtgagacggcattcgtggcatcaactacccagagcacgatttccgcctgctccaatttctggaaggttcgctcaattcctaggctctcgatggtgtcgctcgtttcgcgtatgcctgccgtatcaataaaccggaaagttatcccgccaagattgactgtgtcttctatcacatctcgggttgtcccgtgtatgtcgcttacaatggctcgttcctcgtttagtagtgcattcagcagggtggatttaccagcattcgtttcgccgatgatggctacgggcacaccgttcttgatggcattgcctacactgaaggattgcactagacgggaaattacctgctctatgccgtctgccaggagacatagctcggagcggtcggcaaattccagttcttcatggtcgctgaagtccagttccagttctataagtgatgtgaagtgcaacaattggttgcgtagtgaggtcagctctttactgaacccgccgcgcatctggctcatggcgaggcggtgagtggcggcagaggtggaggcgatgaggtcggccacggcttcggcttggcttaggtccattttgccacccaagaaggctcgttgcgtgtactcaccgggagcggccaggcggcaaccattgccgatgagcagttgcaacaccttctgaagaatatagctcgaaccgtggcacatgatttctgtgctatcctcgcctgtatacgagtggggggcacggaataagctgacaagtacttcgtctatgatgttttcttcttcatggatatgaccgaaggtaagtgtatatggcttggcatccttcagcttcttccccttccgggcaggggtaaatatgcgggatgttatctctatggcatccggtccggagacacggatgcatcctatggctcccccttgggcggtggctatggcacaaatggtatcttggttcattttatccggcttatttttattcagcaaagataatggtttctttacaaaaaagagagatgacgattcaacttatgggcttttattgtaactttgtacaaatcgataatggatagatgcttataaagcctaatccgtctctgtgcccattgtggtcatagcagaacattgctgctatacagaccagcaacgggcacgtcaagcaggatgtgatgaagtctttactaaaccttactccctggactggctgaaagagagggtgaacttagatacggtcgagtactgttttgataagagtatctatcgtattcttgtatcccgtgttcgcttcttttatcaggcggttggcaatgaccatgcatactgtcatggccttgtgccccatcagacggctcaagcctgccagggcagaactttccatctcgaagttggtgatgcggtagctgttgtattcaaatttttcaatcttttcattctgatgcgggtcggcaagcggcacgcgtaactcgcgtccttgaggtccgaagaagcccccggcggcaatcgttacgccacgtaccatgtcgtcttgtgcgatgcggtctatcagttcagcacttgcatcaatgacgtagggggcaggggcacacatgttgccggaccatcccatatggttgaggaaggcacgttccatgggcaggtcgcacacggagttgcgtcctgcatagaagttgagcagaccgtcgaaaccaatggatttttcagaacatacgaatgtacccaccggagtgtagggttgcaagcctccgcaggtgccgatacgtaccagctcaaggctacgtaggcagggcttttcttcgcgcgtctcgaagtcgatgtttgccagggcatccagttcattcatcacgatatcgatgttgtcacatccgataccggtggaaaccaccgtaatacgtttccctcggtaagtaccggtgatagtcttgaactcgcggctttccacttcacattccttgttctcgaaatgggaggcaaccagtgccacccgtccggggtcgcctaccaagatgactttgtctgccagccattcgggctttacgtgaagatgaaatacagaaccgtcttcattgatgatcagttcggaagaggcgaaatattttttcatttgatagagtttttaatcttttgtttataaatagaaacgccgggagccgattcttgttcaccggtttcggcgtttctgtcagttacttttcgagttatttgctcaacggctggctggtattgcccgtcgtcggtttggcaatgttttcgcgcatggaagtgtcagcttctatattcttcatccggtaatagtccatgatacccagattgccgttgcggaatgcttcggccatggctttgggtacttccgcttctgcctcgataactttggcacgggcttcctgggcctttgccttcatttcctgctctgtggctacggccatggcgcggcgttcctctgccttggcttgagcaatgttcttgtcggcattggcttggtctatctgcagggcagcaccgatattcttacctatgtcaatatcagcaatgtcaatggacagaatttcgaatgccgttccggcatccaaccccttgcgtaataccagtttggagatagaatccggattctctaatacagacttatggttctctgacgaaccgatggaggagacaatgccttcgcctacacgggccagaatcgtgtcttctccggcacctcccaccaattggcggatattggcgcgcaccgttacacgggctttggcaatcagctggataccgtctttggcaacagctgtcacaggaggggtgtcgattactttggggttaacggacatctgtacggcttcgaatacgtcacgaccggcaaggtcgatggcggttgccatctggaacggcaactcgatattggctttagaggcagataccaatgcgtgtaccacccgttctacgtggcctccggcaaggtagtgcgcttccagttcgtcacgtgtgatgttttgcaatcctgctttgtgagcttcaatcatgccgggcacaatgatataaggaggaacattacggatgcgcatcaggaaaagttgtaccagcgagatatttactcccgatactttggcggacagccacaagaagaacggtacataatggaagaaaagtaccaggaagataatgcctcctataatgaggaaggcggttaaatacattgtgcttggatccatgagattaaatattaattgttagttataaataggttgatttcagaaatttcactgcttgagccgctccactaagaggactccgtccgcaatacggtctacgataatcggagtcttttcgtttaggaagccgtctgatgactttacttccacgatgtctccgttgatttcggcatagccgatgagggccaggcgggtagtggtgatgcctacatcgcctaccttgactttttcctctgcactacggtctactttggaggtgatgttttttttcaatgcaattttgtcgagtgtcttggagcgcatgaaccataccaacgagccgatacaagccagggcagatatgataagcgtaatgacacctgccgtggtgcccatataggcaaaggcatagtagttggcaaagatgatgcaacctcctgccagaaaaccggcaatactgatgcccggaattacgaataattccactaagaacaagattattgctcctataatcaatgaggcgataatgagtatatccatagttgtctttatttggtggcttgcttttcctggttgcgcacttgaatggcagtttgctccatctcagtggacaattgccgtacacgttgctccaggtcgaggatggcggcggacatcttgtccttttcctgcttgttggctcgggagtattccgaacgcatatcttccagtttctcctgcagttgtttgtagctctgctccagctgattgtatttgccatacgaggctttggcctgcggggagcggaaatcgtccagctggtagtaggtggagtggtcgtcaatgatgaattggaaatcatgcttcttggtggtctgcggctttgcgttggcagcggtccgaagcctttctcgggcaccctttaccgcatcggtgtccgtccatgtgtccttgatagagtgaagttgcgccaatgatatcatcttgtccgggtccatcccttcgtagttgtacacttgcttggatgagttgggaatgaatacatagatgcacactttgccttccggctggtagcggtcggaggcaaaccatcccaagtcgttgaattcgtcgatgacgtacatatagtcgttgtagggcgaattgaacggcatgcccacattttccggcatcagataggagtcggtattcgtattgtaacgggtgacgaaaatatcatatcctcccatcgagccagggccatccgaagcatagtagatagtgataccgtccgtaagtacatagggatagtctgcattcatggcctcgttgatgcttccgggcaacaagctgccatcgctccatttgtccagcaacttgttgcgcgaaaggatactgagggtgctgtccggttgcatttcgctataatatagcttgttgcccagctccgtttcgtataccgttccgccttccttaccggaatctttgaaataggcgtcgtacatgaacagcttgcccgattcggggctgattttgtatgcatccaggaaattttccttgtctaccacaaagctgtcgatgaagcaaacctcttccacacctttcagcatgcgcaagttggatttgcttttttccaataattgttcggcctcttcggtggagcgttttctctttctcaggtcggaaatgtaggtctcataagtttcgatggcatcttcgaaccgatataaatcattgtatgcccgggccaaatagagttgcccgctggggacacgtcttttgacggcgttttccaggtgtttcaaggcttctgcggggtcgccggtttccaagcaacatacaccgtaccataggttgtaatttccattgccaggttgtgtcttgacgaactttttgaaggcgggcttggcctcttcgtattctcccttctcgtacaaggctttggcttctgccaggctttgtgcagaaattgttatgcttaaaaggctgaatagaaagaaaaggatatattttttattcatattgatacatgttttattcatattgatacatgctgatttgttcagaaggtcaaaaatacaaatttatcgtgaataaagctggtttccgtaattctattttgttaattcttctttaaatcgttcttttgccttatttttgcagccggaagagctataacttataactcataactcgtatcaatggcacaatttgctgaagaagaaaagatgttgcgccgcatagacaagcggtttagcaaaggtgtggtggaatatggactgatagaggacggcgataagattcttatcgggctttcgggaggcaaggactctttggcgctggtggagttgttggcacggcgtgcccgtatctataaaccccgtttttccattgtcgccgtacatgtagtgatgaagaatataccttatcagagcgatgtagactatctgagggagtatgtagagtcgtggggagtgccttttgttctctttgaaacggagtttgatgccacgacagatacccgcaagtctccttgttttctttgctcttggaataggcggaaggcattgtttaccgtagccaaggagcagggatgtaataaaattgcgttaggccatcacatggatgatattctggaaactttgctgatgaatatcacctatcagggagcgttcagctccatgcctccccgattggtgatgaagaagtttgatatgacgattatccgtccgatgtgtctggttcatgaggcggatttgatggagttggcacaagtgagagggtatcgtaagcaggtgaagaattgtccgtatgagtcacaatccagccgtagtacaatgaaaggcattctgaaacaattggaggaaatgaatcctgaggcacgttatagtctatgggggagtatgacgaatgtgcaggaggaattgctgcctgcaatcataaaacattaaccattaattattaaaaaatatatgaaagcattttataccattttgctattgattgtatctaatattttcatgacgtttgcctggtatgggcatctgaagctacaagagacaaaagtcatctccaactggccgttgtatgccgtggtgctgttttcctgggtaatagctttggcagagtattcttgccaggttccggccaatcggataggctttttgggcaatggaggcccgttctcattgatgcaactcaaagtgattcaggaagtaatcaccttgataatctttacggtgttcacaacagttcttttcaagggagaaacgctgcattggaatcattttgccgcttttgtatgtctggtactggcggtatattttgtattttataaatgatgggttaatcgcatttgcgcattatttcatatacttctccatcccttttgttaagaacgtttgaagctttccttcttcatccgtataaatgaagcaggcgtcgatatccggatgtgcatccgccacgcgttctgcttcttccagccccatcaccatgaatgccgtggcataggcgtctgcactcatgcaatctttggcgatgacggtggctgacaagatgctgtgctgtaccggatagccggtacgcgggtcgatggtatgcgcatatttctttccgtctttatagtagtagttgcgataattgcccgatgtagccatgcctaaatccgtgacttgcagcactgcttgcagttcctggttcactgccagtgagtcgtctatcggcttgttcaaaccgatgcgccaaggtccattttgagggttttgcccgtgaacaaccacttctccgcctatatcgaccataaagttgcggatacccttcttcttcagaagttgggctatgacatctactgcatatccttttgccacagcgctgcacgagagcattatacgcgggtctgttttcaccactttcccttcatcggacaattttactttttcgtatcctgtcatctccagcaggctgtctatcatggcagagtcggggaagttacccttcttgaacccaaatccccaggcattggcaagaggggcaacggtgatatcgaaggcaccatcggtctcccgggagatttccatgctacgtcggaagacgttggtaaagaatgtgtcgggcacaatgtcctcgttgcggttgatgcgcgtaatggtcgccgtatcattgaaaggggacaaggaaccgtcgaaacgtttgagttccgcttctatctccgccttcagattctggtcacattgataagtcactttatataccgtaccgaatatcagtccgttatccgtttgataaggagtgacttggttgtggcgggcaagtatccagatggtgcccagtaccagtagggcaatccataaaaaattccgttgtactttcttttccatatcctatctgattttttactttttaattaaaagaagagatgctctatcaatatcttggtaccgatgataatgaggataatccctccccaaagttcggcgcgcagtctgcgggctatgccacatccgaaacggatgccgaacatcaggccgaccatcgacaaggcgaatgatacaaaaccgataatcccgatgggggaaagaatagccgagaattgcttgataccgaggaatgcaaacgaaacacctaccgccaatgcatcgatgctggttgccacggccagagcgagcaccaccttcaggctggtagggtcatactcgtgcttgcaaccttcgtccttgaaggattccattatcatacgtccgcccaggaaggcaaggataccgaatgcaatccaatggtcgatactttctatcaggtggctgaaaaaactggcacctatccatcccagcaaaggcatcaaagcctggaaaaagccgaagctgacggccatcaccagcatagggcgcagccggacgcgtttcaatataattccgctggctatagaaacggcgaaacaatccatcgcaagtcctacggccagtagccaaatctctaactctgtcataagttgcttaaagaggtagtttataagttatcgtataggttactcccatcgtgttggagccatatttcccgaaaccgggcacataccacgggtcaccgtattcatcggccgaggcggacaatttgaacttgaagcgtagtgaccagcccatgtacaatgccttccagacgtgcgcccggataccgacacaaaattccgcccattgcatggagcctttcattcctttatggttatagggcaggctgcctccccatatctcgtcgtccagattcggattgcctacgatgccaccatatatcgggtcgtccagtcccaaggcgtctacatcatacttgaagctactaacaccgtaacgcaagcctacgagtagcatgtgtccgtgctgcttcttgtatagcgtgttatagtccattcctatgcggaagtagggggcattgcttttgtagtgtatgcctttgtcactccaggtgtccgtggagccatatcccagttcggcaatagggaagaagcggttcttgaggtttacgtccacggccacttcggaactcaggaaatctcctccaaatacggagcttccgattccccacaagtccaagccgacggacgtgccgttgtataacggatagtgcacttcttctttcgcgtccttcttctccttcttgggaggtgctccctgggggggagcggtaggattcccgttctgcgcccgtagggggaggaacatcagcaggcagagtgccagactaatagaataacttaagattttcctttccatagatgcctgcttcattgtctttgatgtatatcgagtccagagagatgcgggtgcacgttacgtctgtgatggcctgcttcatctgatagccgcaatccattgataggaaatagggggtgttggtgtggcgtatcaccatcgtgtcactcttggtccggctgtacttgaatatcagcttggtggaatcctccgtatagcgcagtggcagggagatgtcgtgtaccttcttctggttgttgatgatgatggagtcggtgccgtatgctgtcacggtgagcgagtcgagcgtgtcgttctccacgtattgggtttcggggtctactctataaagaatgcaattcaccatggagcgtgctgtcatggaacagtcggcctcttccgagcaggagatagctatgcttactatcggacaaaggatagctccgagtatgacaagtctgactaattttttcatcgttaaatggttttctctatttgatatttgtttcgttccggggcattacgtgaaatcagctctccgaggaatcctgccacgaatagttgtgtgccgataatcatggaggtcaacgagaggtagaagtagggagagtccgttacaagacggtagggcatgccatggtgcatgtagtacaacttgctgacacccactatgactacggctatgaagccgaagatgaacatcaatgaacccagcaatccgaaaaaatgcatgggcttgatgccgaaccgggaaaggaaccaaagggaaagcaagtccagatacccgtttacaaatcggttcagcccgaacttggtctttccgtatttgcgtgcctggtggtgcaccactttctcgccgattttcttgaagccggcgttcttggccaggtaggggatgtagcggtgcatttcgccgtatacctctatattcttgactacctctttgcgatatgccttcagtccgcaattaaagtcgtgcaggtttttgatgcccgatactttgcgggcggtggcattgaacaatttggtggggagggtcttcgacaacgggtcgtaacgtttctgcttccagcccgatacgaggtcgtagccctcctgggtaatcatgcggtagagttcgggtatttcgtcgggactgtcctgcaggtcggcgtccatggttatcacgacgtcgccttgtgcttgttcgaaaccacagaacaatgccggcgacttcccgtagttgcggcggaacttaatgccccgtaccttgtccggagcttgtgtctgcaattgctcgataacctgccacgaacggtcggtacttccgtcgttaacgaaaatcacttcgtatgaaaagccgttggcattcatcacccgctcaatccatgcgaacaattcggggagtgattcttcttcattatatagtggtacgacaactgaaatatccattgatgtatgatttttctattttacaattgaaataacaattctttttgctgttccgtcactctgccggagcgtcgtctttcttgcgtctcatcacgaacaaggcggtggggaaagccagtatcgaaccccaaaatacattggacgatatcatctgtagcgtaatgtcgatagggctgagtagtcgggctgtctccaaagcttcctgataggtggcgatgtacgaatccattcccggcatgttgctttgggcaagcgtgtctaccatcgtttcgcacgtgtttatcacatatccgtggtctatgaacctgaagtagatgtagtgtgccacggcggcaagcagcgcggcaaacatatacatgaaaacggtgaatatccatgcatgcaggaagctgatgccgcctccgcatacctgattacgatacatccgtgcataataatatcccataaaaggtacgcatagcgtgagtcccatgaaaaggaaaagtaaaaaaggaaccgacagccccacaggaaagagtatgaacttcaatatccagaaacctcccatataggtaccgaacagcattgcgtatcgttgcatgtaacctctattttctgccatctttcttagaaataatgtgcaaaggtacaaatatagttggattcaagggcaagccgatgtgtagattttaaataaattagaggattctttgcggggcaaaaagaaaaaagcaggtaacactttcgtatcatctgcttttctttcgagcctcttgtcggattcgaaccaacgaccccgagattacaaatcacgtgctctggccaactgagctaaagaggcgggtgggtaagcttgctatatcgcgccgctacaaccaactacctttgctgcgatcaagccctggaggattcgaagggagctggccgtataggacttacccgttttcgttttgcggttgcaaaggtaggcattattttgaaatctgcaatagcttgcggcgatttttttatttatttttttagattctctattctatccctcttcacggctccttatacagacactttggaggggaggtacggattctttccggcattacgatggacaaatattccttttactaaaaagtattcgtccgacatgtgtaaccttatcgtccgacagttgttgaattatcgtccgacagctgtcggacgaatacttcttagtataccggaatctaaagtatagtaatgcaaaagattgccattcgagaagaaaataataatcggggacgaaaaaactgataggctattgtgcgctaccttgaaaataagcattatttttgtgcaactaactatatagtcattatacacatgaacaaacacatattgtcattctacttttttttctgcctttttctttttctccctttggtcgaagcaattgccggctggaatagctttatcgtcaattttgataaaagtgtttatggcaaggggacccagacttggcagatagcaccctatgatgacaagtgggtatatttcgccaacaagaacggtatggtgcaatttgatggcaatgtctggaatgtatttccattgaacaatgcttccgatgtgcgttccgttctggcttctgctacccaaaaaagaatttatgtggggggcatcaatgagttcggctattatgaaccggatgcggacggttctttggcctatcattgcatgtccgatactttggagagttccgttcgttttcttggaaacgtgtggggcatccatgagactgacaatattttgtatttccaaggggacgggtgtgtggtgaagtacctgaacggaaaatataccgccattgaaatgaatgccaagatagactgttccaatatggtcaatggtattctttacatcggtacggacagaggtgtatggcttttggttggaaacacttttttccctcttcagggtgccgatgcgttagcttccaaacgtattcgtggcattataccttataagaaaggtgttctggtggtgactgcatacaacggactttactattgtgacgggcgtacgatggaaccgtttatcaccggtgccgaagagtttatgcgtgagaatgaagtcttttgcgtggccaaaaaggatgataagattgccttgggaaccattcataaaggattggtactggtggattgcagcaccatgcaactaaaatatttcaatgagaacaacggcttgcgtaacaatacggtgctttctgtctccttcgatacgaccggaaacctctgggccggtctggatagcggcattgactacgtctgtctgagttctccttttacgaatctctattcctatccctattcctacggcacgggatatacggcggctgtagaaggcggctatctttatttaggtaccaatcggggtttgtattacacctcttatccggtacagatgaacggtgatttgccggatatccgtccgatgccccaatccagcggacaggtctggaacctttgccgtataggtgatgaactcttctgtctgcacgaccgtggtattttccttatcaatggcacttccgtaaaacgcgtgacggatattgccggcgcctggtgttgccaacttgtggcaggacgtacggaccttatgtatgtcggggtatataacggtatttatttggttgggaaaaagaatggagaatggcaggtggttggcaagattgagggtatgaacgattcttgccgtctttttgagcaggaaagcgataaggtgatttgggtgtacaatacagatcatgttacccgtgtggatttggataatgatttgacaaaagctgttcgtataaaggaatatagcgcgaaggatggttttccggtaggacgtgatatgtatatagcgaagatagaagaccgggtgtattttgccactccccggggaatctataagcataatcctcataaagatgtcatggagccttgtccggatatgaacaaccttttgaatggcaccgcggcctattcgcgtatcttggagtatcacgataagttgattagtttgagctctcacgaaatctgtattgccaatctgggtacctataagcggggggcgaatacaagcattaatcccatccagcaatcgctgattgaactggtacccggttttgaaacgattattcctctttcagattcgctgatggtggttcctaatgaaggaggtttcgctttattcagcatcccggccgtaagagagcgtcaagatcgtagccactccttatatataaggaacatgtatctgtcttatcccaaggattcattggtatataccgcaaactttttaggagagaagccggttccggtgatagcttattccatgaattccgttcgttttgactatgccctttcttttttttcggtaggggatgatatccattttcaatatcgtttgaataagggaggctggtccgatttcacaacggtacgcaccaaggagtatagcagcttgtcggaaggggaatatacgtttgaagttaaagcggtctttcctgacggtacgacatcatcggatacaatcgccttccgtatacttccaccgtggtatcgcagtgctgttgcatacgtttgttatatcatcttggctttgcttgccttatggtatgtctatcgctgggatgatgtccgtgtgaagcggaagaaacagcaggcggtggtcgagaaggacaaggagttgcacgatatggaaagggagtacgaagaggagaaagctcgtcaggaaaagcagattatgcagctggagaaagaaaaattggaatacgatttgcaacataagagccaggaaatggccaatctgatgataaactttgtccgtaagaatgaaatgctgactgaaatcaagtcggagatacttaaagtatccgccttgctgaagggtgagggggctcgggaaggaaaacagcaactcatacttattaataataaaatagacggtaatatacagagtgatgaggtcttgaagcgtattgaagaccagttcgatttgatacataacaattttatgaaacgtcttcatgccaagcatccggaactttcccacaacgaacgcatgatgtgcgcttatctaaagatgaatctttccacgaaagaaatagctcctctgttgaacatttcggttcgtggagttgaaacaatccgttatcgtcttcgtaagaagttcgctttagagagaggatagtttgacggattatttaagcaataaactgtagcctttagatattaacttcctttaaaagaaggaagtgcatggaagggaggaatgttaaattcctcccttttgtgttctataacatgttgtgacgtaatacttgaaagtatatattaactattgattattaataagttatttgttaatgacgtattgataacgtatttgaattttgtatttgacgtatttaagaatgattgtttcttgtttgttttattgccttttactctatgtttgcactgttcgattgaggacaaaaccgagaaacgttaatcttaatttagtaaaacttatgaaaaagttattatcagttttatttctgttaagctttaccttggcttctgtatatgcccaaaatatacaggtaaaaggtacagtggtaagcggttcggataatgaaccgttgcctggagtaaatgtggtagttaaaggtactaccaatggtggaattactgatttggacggtaattttacattgtcggttcctgccgacgcaacactttctattacttatattggttttaaatcgcaagaagtagcagtagaagggaaacatagtctgaagattgttcttcaagaagatacagagacattggacgaagttgtggttgttggttatggcgttcagaagaaaagtgtagtaacggctgctattgctaaagtatctgcagatgatttgtctactacagctcctgttcgtatggacaatgctttgaaaggacttgcagccggtgtgacggtaacttctgcttctggtcagcctggtgctgctgcacaaatccgtatacgtggtattggtacgactactggtgacggtgcagctgatccgctttatattgtggatggtatgccaatcgaaggtgggcttgattatctgaatcccaatgacattgcttctattgaagtattgaaggatgccgcttcaggtgctgtttatggtgcacgtgccgctaatggcgttattttggtaactacaaaaacaggtaaagaaggtaaagcaaaggttacttatgatttctcttacggatggcaacgcccttggaaagagcgtgatgtattgaatgcatcagaatatgctgtaatgatgaatgaaggtgctataaatgcaggtatggctcctaaatacagtgatccgtactcttatggagtaggtaccaattggcaaaaagaaacctttaattatgatgcaccggtgatgaatcaccaagtaagtgtgagtggtgcttctgaaaaagtgaactatctgttttctttaggttattatacacaagatggtattgtaggaggtaattacggacgttccaattatgaacgtttgactttacgtagtaatacggcatatacgatttttgatgaaacaaaaaatcgtaactggttgaatagcttgaagattacttctaacttgtcttatgcacgtatcaaaagtacaggtattgaaactaactcatcttttggctctcctttgggtagtgcattggctttgtcacctattcttacagtgtatgcagaaggacaagccgctgaagatcagttggattattacaagaattttgaagggtttactcccatgtatgatcccaataatggaaaactatacactttagcaggtgccgattataacgagatggtgaatcctcttgcgagtctttctttgccgggcgataagggttggagccataaatttgtagctaatttctcggcagagcttaatctttgggataatttaaagtttaagacttcttatggtgtggaccttgctttttggggaactgatggctatacaaaactttattatctgactgcaaataataaggctacagaaagtagagcaacttctaaaaaagaagatggtactgtatggcagcttgaaaatgtgttgatgtatgataagaccattgatcgtcattcgttctctatattgttgggacagtctgccaagaaaagttcaagtacttatttgggtggttatcgtaacggtatcataaattatgatcgtccttatattgatgccagtaacggtttgcaggaaaatggtgatatgaacatctatggtggtccgaacgcagatgctactttggcttctctttttactcgtgccagctataattacgacgaacgctatatgttgcaggtaacagttcgtcgtgacggttcctctcgttttggagccaataatcactatgcagtgttcccttctttttctttaggctggaacttgactaatgaaaagtttatggaaaaacgtcctgaatggttgacttcaacgaaagtacgtttttcttggggtaaaaacggtaatgagaagattggtaactttaaatatacggtgttgacgtctgccaacaataattatctttttggttctggtgagaatatggtgaatggcgtgaaagcaagtggccttgctaatccggatttgaaatgggaagaatctgaacaacttgatttgggtatcgactttggtttctttaataatgctttgacgtttactgctgattattacaagaagactaccaatggtatgttgatggagatgaatattccttcttatgtgggagaatctaaaccgattggtaacgtaggaaagatggaaaatagtggtgttgagttagaagcagcttataaattccgtgtacgtgattggaacttccgtgttgctggtaacctgtcttacttgaagaatgaattgatagaatatggaaatgactcaggttgggcaaatcttgactctttccagggtatcggtactatcacacgtgctcaaaatggtatgcctttcccttatttttatggatataaaacagcgggtgtttttcaaaacgaagcagaaataaaagcttatacagacaagaatgggaatatgattcaacctaatgcagttccgggtgacgttcgtttcgttgatttggatggtaacggtgtaattgatgataatgaccgtacagatattggtaaaggtatgccggattggacttatggtttaaatttaaatgtggcctggaagaactttgatttaagtatgatgtggcagggaacaataggtaatgacgtgttcgatgctacccgccgtgtagatattacaactagtaatcttcccacttggatgttgggacgttggactggtgaaggcacttccaatacatatccccgttttgtattaggtgacaatgtgaattggcaatcgtctgatctttatgtttatgatggcagttacttgcgactgaagaatattcaattgggatatacacttcctgaggctctgacaagaaaggtgttcatttcctctttgcgtgtatatgttgcagctgagaatctgttgacctttaccaaatatcatggctttgatccggaaatatcctccggtagtacttctttaggtattgaccgtggtgtatatccgcaagccaagacctggacggtaggcgtcaatgtggcattttaattttacttactattttaaattaggaaaatatgaaaagatataaatacatcgtagcaggacttctggtttctacatttatgttaggcggatgctcagaatcctttcttgaggtagattcacctacacaagagacagttgatacttattttactacagatgagcatattcaagaagcagttgtagctgcttatgacccattgcattggccggattgggcaatgagttcctataatcctgtcaatctgatgagtgatattatggccgatgacctttgggttggaggagccgacaagaatgataaccagtattggcatctgatgatgaactatgaagcattgccgactaatacgatgactggtctttggacagtagcctactcaggtgtgaagcgttgtaatgatgtgataacttatctgggctgggcaggtgataatgttacagctgagaatcgtgcttattatgaagcgcaagtcatagcacttcgggtattctattataattggttatggaagttctggggcaatatcccttattttgatgctaatctggaggctccctatttagcagaacaattgactgctgatcaggtttatgagagaataattacagatttggaaggggttatagcacttgatgtattgcctatgagagccgaatcatcagattatggccgagttacacaagcaatggtttatatgctttatgctgaaatcgtgatgtatcaaaatgataatacacgctatgcaaaagctttacaatatatgcaggatatcatcggaagcggagattatgctttggttgatgattatacttctatctttaaagagactggagaatggagtagtgaatcaatctttgaagtaaactataaagatgacaatgcagctcgttcatggagttctccgttgactgctggtggtacagtacttcctcgtcttatcagccctagtgcctgggctgatggaacggatggacatgataatggttggggctttggtccagttcgcaaggaaacttacgatcgttattctaacaatgatactcgtagggatgctacttgctggaatgccgctgcggtaggctcttataatcctcgttatcaagacacaggtttcttccttgaaaagtatgtagcccatacgggagataataaagaccagattgctgatgcagatttgaattacaacaataatctccgcatctaccgtttctcagaaacattactcaatgcggccgagttgatagttcgtggtgctggtacaggagatgctaaggagtatctgaatcgtgtgcgtaagcgtgcagggctggtgactgaaatagaacctaccattgataacatcattgaagaacgtcatttggaatttgtgggtgaaggaaagcgctattgggacttgatacgtaccgataaagcagctactgtacttgtccccgatgaatatggctatcgtacaaatacttggactgcaaataaaaagtatttacccattccgcagagcgaaattgatgctgcacaaggcactttgactcaaaataattactaatcatcaaaaagcgtaagattatgaaaaatatatttagctatatcagtggagcaatactgacggtagcagttgcattgggggttacagcttgttctcctgagaaatttgacgctcccaatcaggacggaattcctatggcagctgattatgagagtgctgttcacatagaagttgatcaagaaaccaactatgcctatttctcttttgatgcacaggcgggaggtgtgatgccaatctggattattgatggaaaaagctattccacttctttttccatgtcgaagtattataggaaagctggtgattatagcatagaggtgaaaattgcaaatgctaatggtatcagtgatgggagtatccagaagacatttcatgtcgataaaactaagatgaatgggtttggagggtttgtttatgattctgattttaatctttggaaaacagcaacagtagctactcctacattctactatgctccgggatggagtcagatagcagatcctgctttctcggttgttgaaggtggttatgtgataaccctgccttcagcaacaacagacacatggcaggcacagatgcttgttggtacggacattgctacttcggctgataaaaattatgatttttctgcgattctgacttctactacagagcatcctcatgtaatggtaaaattggttgatagtagtgatgacaatatcttttattttgctgagactattgctttgactgccaatgaaccggtctgcttctggaaaagtgatatggcaggacttgatatagccaatttgaagtttgtatttgattttggtgggaatgccgaaaatacggaaattatggtggaaagtattgtattgaaggatcataccaatgatgatggaactattgttccagaggaagaaactgttccggaacctacgtggagtgctgtggatagtgaagataacctgtggtatggtactacctttacaactacctattattatgctccgggttggagccaaattgctgatcctgaattgaagattgaaggaactgaatattctattagtttctcggaagcaacaggggagcaatggcaaaatcaagttgttctgacaacggaaggacttactactactgctactgaagaatatgacttccggatggtaatgaatgcaacaaatgatattgcaggagtaacagtgaaattgacgcagacagatgatgatgatgcttatgttgtattggagcgtaaggaccttcttgcgggagaagatatagtgataaaggctatcaaacagaaaggtgttgacatcactcaagctaagttagttcttgacttcggaggaaatcctgctgctacagatgtggtgattaaagatattatttttcaaaaacatagagattgaagactagtattggataggatattggtctactaaaaaacagtgaattataaaaggggggaaggatgtgtgttatcttggcaattgctggaatttcatcctttccctttttctctacttatgttataaagaaatatatatgaaatactattgtctattatctattcttttgttttcgttgattgcttgtggcagtaacgatgacaaggaaccgcaatccgaggatgttaccattaaatgttctcctgaaaagatagaggctgttgcacaagctagccaatatgtggtgaatgtggtttgttccggtaaagagtggacagcttttgcctctgatgattgcagttcatgggtcaaagtaaatgtaataggttcttcttctagccaaggcacagcgacagttatagtcagtgctcatacgggtactacttctcgtactggtacagtggtggttaaatctggtgctactcgtgtatctattcctcttacgcaagcggctcctttatcagtgtcacagactgagttgtattctaattctgtaggagaaaattttgtcttatctgttattgcttctggcgaatggaatgtgaaatccaatgatagttggattagcgcagaaaaaaacggtgaggagattgttgtgaccactttagctaatgatgcaaagatttcccgtacgggtacagttgaggttgtggctggtgcagagaaagtaacggtaacagttattcaagaatcggctgaagatctggatatcaatattcctgaggggtatcggttggtttggcatgatgaatttaatgagggtatatctctcggcaatgactggacacacgaagttcaaggagcagggtgggtaaacaatgaacttcagaattacgttaatggttccgctgacggaaagcgtgtgacagaacttgtggacggtaagttgaatataaattgtttcaaaggctccgatggtaaaatttactctggtcgtgtgtatgctaaagtgaatactggttggaaatacggttactttgaagcacgtatcatgttgcctgaaggcaaggggacgtggccggctttttggatgatgccagttgataatgactggaatactaatccatggcccatgtgtggtgaaatagacattatggaggaagtgggagtcgtgcccaacgaagtctcttcgtctatccatacgcaagattataatcatactataggtacgcagaaaacacatgccatgactatagaacaggcagaaggagaatttcatctctatgctttagagtggacagaagatgccatcactacatacgtggatggcaaggtacagttggctgttaccaagcaacaattgggagctggtcataatcaatggcctttccattatgctttctatcccattctgaatctggcttggggcggtgattggggtggaatgaacggtgtggatgagtctgctcttcctgtaacgatgaaggtggattatgtacgtgtatttcagaagaagtagaactgtttttttatgaagtttgaaaatgaaggttaaatgctttttttatttataacatagcataccttatgctttagaacaattgataatgaaaaaagaaaaaatatttatttttatctgtttagttttgttgtctgcctgttcttcttcttctttagacggcattgtaatagagaaagcggcagacggttataaactttccattgacggaagagaaacctatattaaaggcgtaggcggcacatatcggttagacattgccgcccagagtggtgccaatgccttcagaacctggggaggtaatgtggaggagataaagaaaaacctggcattggcttcagagcacaacatgtacgtaatgcagggaataggcatgaccaaagactccatacgctattacgatgatgaatataagaacaagatgcgcgaagaagtccgcttgttggcagaaacgttcaagaatgatacgagtttgctggcttggggtattggcaatgaaattgagttgggaaatgccaatatagctgccgcatggaattttgtggaagaactggcacagctgattaagtcgatagacaagcgtcatctggtttcgacagtgatttcctacaatccgtcggcattggactctgtggcaaagtatgctccgtctctcgattatgtgggcatcaatgtatatggtccgatgggagaggtgcaggctgttgttgaccggtcggactacaagggtgcatttatgattaccgagtggggaccgaccggttggtgggaaacagcgtcaaccgagtggaaggcacccatagagcaaaccagtgaagaaaaacggcaggtatacgaagagcgttatacgcaatatatttctgccaatacccgttgcttgggctcttttgtattcttgtggggacaaaaagaagaacgtacgcctacttggttcagtatgtttgtagaagacacggtggatatgttgcctctgaaaggagaaaagactcctatggtggaggctatgcaaagagtgtggaccggcaaggaattggatgaaacggctccgatagttcggggcatgactatcaatggtaaaagtgccattgataatgtccgtatcaaagcaggtactttatttaaagcggaggtttccgtcacagataaggagaatgattctttgacttatgtgtgggaagtactgaaagaggctacagtcttgggttttggaggttcttatgaaccacgtccggaaagaatgggtgacgtggccgtgtcagacaagaatgtgtatgagactatgattaaagttcccggggaatatcgtttgtacgtatatatacttgataatacgggttttgtctctacagcaaatgttccatttcaagtaatagattaaagatgaaaacaatgaaaatgctctctgcttgtttattgctgcttccttttatatcttgtactcaagtgcaggatacaaaaaatgacgcagtcatcgagcagaaaatagaagcgctgttgtcccgtatgacattggaagaaaaaattgggcagatgaaccagatttcttcttatggtaacatagaggatatgagcggattgataaagaaaggtgaagtcgggtctatcctgaatgaagtagatccggtgcgtgtcaatgccttgcagcgtgtggcaatggaggagtcccgcttgggcatccccttgctgatggcgcgtgatgtgatccatggtttcaagaccatatttcctattcccttgggacaagcggcatctttcaacccgcaggtggctaaggatggtgcacgggtagcggctgtggaggcttctgccgtgggtatccgctggacatttgcaccgatgatagatgtggctcgcgatccccgttgggggcgtatggccgaaggatgtggcgaagatacttatttgacttcagtgatgggtgttgctatggtcgaaggtttccagggagattcgctgaacagtccgacttccatagccgcatgtcctaaacattttgtaggttatggtgctgccgagggcgggcgtgattataattccactttcattccggagcgtcgtttgagggatgtataccttcctccttttgaagctgtagccaaggcaggagcagctactttcatgacttcgttcaatgacaatgatggagcaccgtctaccggaaacacttttattttgaaagatgtgcttcgtggtgaatggggatttgatggaatagtagtgtcagactgggcttcggtagccgaaatgatggcacatggctttgctgccgattttaaagaggcagcaatgaaggcggtgaatgccggtgtggatatggagatggtcagctatacgtttgtcaaggaactgccggagttgataaaagaaggaaaagtcaaggaatctgctatagatgatgcagtgcggaatattctgcgcgtcaagtaccgtttaggattgtttgataacccttatgtagatgagaaacgtatagaggaactttatgctccttctcatctggaggctgccaagaaagctgctgtggaatcggccatcttgctgaagaacgaaaaggagacattgcctctgcaatcttcggtaaagacggttgctgtggtaggtccgatggcaaatgcaccttatgaccaattgggtacctggatatttgatggtgacaagacaaaaaccgtgacaccgttgaaggctatcaaggaactggtgggggacaaagtgcaggtgatatacgagcccggtctgacttatagccgtgacaagaatatggcaggtgttgccaaagccgctgctgccgctgcacgtgctgatgttattttggcgtttgtaggcgaagaggctattctttcaggagaggcgcattgtctggccaacttgaacctgcaaggtgcgcaaagcgaactgattgccgctttggcgaaaacaggaaaaccggtggttactgtcgtaatggcagggcgtccgttgaccataggaaaggaagtcgaactctcgtctgctgtactttattcgttccatcccggaactatgggaggaccggcattggccgacttgttgtggggcaaggctgtgccaagtggcaagactccggtgacgttcccgaagatggtaggacaaataccagtttattatgctcataacagttccggacgtccggctacgcggaatgaggttttgctgaatgacattccgttggaagcggggcagacttcgttgggatgtacctctttctatatggatgctggtttcgatccgctgtatccttttggctacggtctgtcgtatacgacgttcaaatatgataatgtgaaactctcgtcagccaatctgaagaaggaagatgtgctgactgtgactttcgaccttgagaataccggaaagtatgaaggtactgaggtagcccagctttacgtgcaggacaagttcgcttcggtgacccgtccggtgagggagctgaaacgctttgctcgcatcacattgaagccgggcgagaagaaaaatgtatcgtttgaacttccgataagtgaacttgctttctggaatatagatatggtgaagacggtggaagtcggagactttgctctttgggtggcaccggatagccaaagtggagaagcagttttctttaaggtagtagattgattgttgatttaaggttaaaaagagaaggggcggactgtgacggttcgccccttcttacatttaataaatgcttttttctttataagctctgtcttccggtaaagaaagacaccggcaaatcactcatcacctatcactttcttatatccatacaccgcattgcttcccagctcttcttcgatacgaagaagttggttgtattttgccatacggtctgaacggctcagtgaaccggtcttgatttgtccactgttggtagctacggctatgtctgcgatagttgaatcttccgtttcaccggaacgatgggaagttacggtagtatatccgtggcggtgtgccatttcgatggcgttcagtgtttcggtcaacgaacctatctggtttactttaatcaatatggagttggcgcaacctttttcgatacccattgcaaggaagtccacattggtgacgaacaaatcgtctcctaccaactggcaacggttaccgatacggtcggtcagttttttccagccgtcccagtcgttttcgctcatgccgtcttcgatagagtcgatgggatacttgttgattaactcttccagatagtcaatctgttcgtcggctgtacgcttctttcctttttcgccttcgaatttagtataatcgtagatgccgtcatggtagaactcggaagaagcgcagtccatggcaatcattacatctttgcccggttcgtatccggcagccttgatggcggcaatgatggagttcaaggcatcttctgtaccctccagattaggagcaaaacctccttcatcgcctactgctgtgctgaggccacggtctttcaggactttcttcagtgcatggaacacttcggcacccatacgcagaccttcgcggaaggaagtggcacctacggggcgtatcatgaattcctggaaagcaatgggagcgtcactgtgcgaaccgccgttgatgatgttcatcatcggtacgggcatcacataggtatttgtaccaccgatatatcggtagagtgggatgtcgaggtaagcggcggcagccttggccacggcaagagatacgccgaggatggcattggcacccagattggctttcgttttggttccgtccagtgcaagcatggcatggtcgatacccatctggtcgagggcggacataccgatgagcttgggagcaatgatattattgatattgttcacggctttcaggacacctttgcctccgtaacgttttttgtcaccgtcacgcagttccaatgcttcgtgttctcccgtggatgctcctgacgggacagatgcacggcctatgaagccggattccaaggttacgtctacttctacagttgggttacctcttgaatcgaggatttcacgtccgataatcttctctattttcatattcagtcaattttaattataaactatcttactaacaattgaaaatagggaattgtttttcgtttttaatcctttattgtaatgctgagaagtgcagtcaggtccatggtttgggaagtattggcgatggttccccgtatgtcaagtagattaaggcgtatacctcttatgtgagagtcgcttaggtcgatacctcttagggggcttttgtccctctaaggtaggaggaatgatgcgtacgggaggcatgacaaaaggtttactgggtttcatagggggtgtttggagttatatacagcgtccgaaggtaccgccggcgaaagcagcaaggactcctaatgtgatgcttaacaaggtatataaggcaaacattccgtagaatccttgctttatcagaatcagtccgtcattgctgaaagtggagaaggtggtgaatcctccgcacagacctgtagtcagcaacagccgtatttcggtagaaaggttgaaacgggcggataaggtataaaatagcccgatgaggaaacttccgaggatattgactgtgaacgtagcccatgggaaagagtaggggacgatgcgctcgtggagcatcatctgtacgcagtagcgcagtacgctgccggtaccgccgccaaggaatatagctatcagtattttgtccataggatgtataggtatgatttttgattgcaaaggtaatcactttttgtatgccaggctatatgctaaagtctgtcttttgtatctatggcaccgaaatttgttgttcgcgttctatatcttgcatcttgaaatatgggtgggctggaggcaacccggaaaattcaggagttcaatggtgttatttcggttgtagcgcttacggctaatgtttttgttcaagggaaacaggctttcatgcaaacgtttgccgataaatcatcataattttaatttaattgcgtcagagcgtatttctttcctgcttatatttgcatctggaacataattttataaatatagcatgagaaacatgaaagtaatctgtacaaaattagcctgcttcctgcttgttttgttggtgagcggcgtagcaatggcagagagtattacctctcccaacggacaacttcaattgaatttttcggtaaatgcgcaaggcgaacctgtttacgaactttcttataaaggaaagccggtgattaacccttctaaattaggactcgaactgaagaacgaccccggtctgatgaatggctttacgctggcggatgcaaagacttccactttcgacgagacttgggaaccggtatggggtgaagtaaagcaaatccgtaaccactacaatgagctggctgtgacgctcaaccaaaaggcgcaggataggaacatcattatccgcttccgtttgttcgacgatggtatgggcttccgctatgaattccctttgcagaagaatctgaactatttcgtgattaaggaggagcgtactcagtttgccatgactggcgaccacacagccttctggattccgggcgactacgatacgcaggaatatgattacgcagaatccaaactttctgaaattcgcgggttgatgaaaggggccattacgcctaactcttcacaaaccccgttttcgcccaccggtgttcagacttctttgcagatgaagactgctgatggcttgtacatcaacttgcacgaagctgctttggtggattactcttgcatgcacttgaacctggatgataagaattttgtttttgaatcttggcttactcccgatgcagtaggcgataaaggttatctgcaagctccctgcacgtcaccgtggcgtacggttatcgtaagcgacgatgctcgtgacatccttgcctctaaaatcacgctgaacttgaacgaaccttgtgcttacgaggacgtttcctggattaagcccgtgaaatacgtaggtgtatggtgggaaatgattgcaggtaagagcacctgggcatatacagacgaccttccctccatcaaactgggtgaagtggactactccaaaatgaagcccaatggccgtcacggtgccactaacgaaaatgtaaaaaagtacatcgacttcgcagccgagcacggtctggaccaagtattggtagaaggctggaatgaaggctgggaagactggtttggcaaatccaaggattatgtattcgacttcgtaactccttatcccgatttcgacgtgaagatgctgaatgaatatgccaagagcaaaggcgtgaagttgatgatgcatcatgagacatccggttcggtgcgcaactacgaacgtcacatggacaaggcctatcagtttatggtggataatggctacaatgccgtgaagagcggatatgtaggtaatatgattccccgtggtgaacatcattatggacaatggctgaacaaccactacctctatgccgtgaagaaggcagccgactacaaaatttgtgtaaatgcgcacgaagctgtacgccctaccggtttgtgccgtacttatcctaacttgattggcaacgaatctgcacgaggaactgaatatgaggcattcggcggcagcaaaccgttccataccacattgcttccattcaaccgcttgattggtggtccgatggattatacaccgggtatcttcgataccaaacttgactttatgggcgatttgccccacggacaagtgcagactacacttgccaagcaactcgctctgtatgtaactttatacagcccgttgcagatggctgccgacttggttgagaactacgaaaagcacatggatgctttccaattcatcaaggatgtggcagtagactgggacgacagcaagtacattgaagcagaaccgggtgattacattaccgtggcccgtaaggcaaaaggaaccggcaactggtttgttggaggtattacagacgagaatgcacgtacagccaactttatgctcgacttccttgaaccgggcaagcaatacgtagccactctctatgccgacggtaaagatgctgattacaaggagaatcctacttcttatcagataaagaagggtatcgtaaccagcaagaccaaaatgtccgtgaaggaagcgcgtagcggtggttttgcattgagcttgattgaagcaactccggctgacaagaaagctgtgaagaagtggagataatttagggtagaaagagtttttattaggcattagtgaggccccgcagaagtccaatctttgcggggcttttttttgtgttagggtaagctcattcttataccgtaaaaatagcatcaagacccgagtttttggtaagtccgttctttggggaaacctttatttttgcactcagataacagattgcataatcattaaaaatcagagatatgaatacggataagaaaatcagtcgtcgggaggctttaaagcgtatgggatttgccgtgatgagcggtgctatcacatcttccggcctactctcgttggcatcctgcgaaacaaagaggagtaagcgtatcatcttttattttaccggaacgggtaacagtctttacatcgcccgtcaattagctggagagaacgcagaattgttgagtatccctcagatggtgaaacgggggaagtatgaatttgaggcagatgaaatcggcatcgtttatcccatctacggtcatatgcctccctatatggtacggcagttcattcagaaagcaaaactgaaggcagaatacaagtttgctgtcctcacctatggtgcaaggaagtgcgatgcggtagagatttgggaccgtatatcccgtaaagccgacaatgcgtttgactatatcaacactatcatcatggtggataactggctacccaacttcgacatgaacgagcaactcaagatagacaagcacatccccgagaacttgcagaagataacggcagatatcaacagtcggcagcattggcacgaaccggtgacggaggaggaacggcaacagcaccaaggttttatgcagcggagtggactcgaccccgaggtgggcttcctgatgaaaagtgagaagttctttaccgtgaccgatgtttgtattgactgtggcatttgtacctacgtttgtccgcgcggcaactatgagttgacgtcgagaggagtgaagacgtccggtgactgcgagttctgttttgcttgcatacagaattgtccgcagaaggctattcagttcataaagcaggaagatggctcttttcctgacggaacggagaagaaccccaatgcccgctatcgtaatgagcatatttcgctaatagatctgaaacgggcaaacaatcaaaactataatcattaacttctgtattctgtcggatttacacccagatgttgttgtacgtaacggctaaaataagcaggagaggaaaaaccgaacatatcggaaatacggacgaacgttagtgatttgtcgcgcagcaaacgcgagatgtcgagtgtggtatagcggtttatccagtagtttgctgtataaccgcttactttcttggaaacttccgaaagatatttggaagtgacacataggcagtcggcataataggtcacttcacgatgctcgcggaaagttccgttttccagcatgttgaggaaacggttcatgatggaagcattttgtacagagatattgttctcgccatatagatgggagtggaaatcgaagaagtcgagtatcaacatctgtgtggaggcgataagcatatcgcgatggaaatgatggtctgtattccggagtctgtattccacttgttcaaaatcccggagacatagctcttgctgttcggtagtcagggacatgataggattgagaaatagggaaagttgccctttcatgccgtagttgttctgcggtgtactcagcaccacaaagcccgatgcgatatagatgacctttacacgaaaatcttctgaaggttgaattttctctaccagttttcctttgcggacaatcatcagatcgccggcacgtaactcgcgctcctctccattgtacttcaaccggcagattcctgacagacagagggcatgtgcaagatagccactgtatgcgtccgtccccagaccttgaatagtatcggctattataatatttgcggtttctcccattatacagttgtttggtttcaatcacaaaagtatatgtttccaataatataaacttctatatggggcaagttttattcatttcaaatctgcctgaatttcgcaaattcttcatacctttgcatccattaattttagaaaccaataataaaacagaacttatgggaggttttttcggaacagtcgccaaggcaacaagttgtgtggcggatttgttttacggcacggattataattcacatttagggacaaaacgtggtgggttggctacatacgatgcagaaacggcgcagtttacccgttccatccacaatctggaaagcacctatttccgcacgaagtttgaagatgaattggacaagttcaagggaaattccggaataggaatcatcagcgacacagaccctcaaccccttatcctcaactcccaccttggccgctttgcccttgtaacggtagccaaaatcgtgaatctgcaagaactggaagcagaactgttggctcagaacatgcacttcgccgaacttagttcgggcaagaccaatcagacggaacttatcgccctcctcattatacaaggaaagacatttgtcgaaggaattgaaaatgtgtataagcatatcaaaggttcctgctccatgctgcttcttacagaggatggtatcatcgctgctcgtgaccggtggggacgtactccgattgttatcggaaaaaaggatggggcgtatgcagcgacaagcgagtcgagcagcttcccgaatctcggttatgagatagaccgttatttgggacccggagaaattgttcgcctgcgtgccgatggggtggaacagatgcgcaagcctgatgagggaatgcagatttgttccttcctatgggtatattacggtttccccacttcctgctacgaaggtaagaatgtggaggaagtgcgttttgcctccggtttcaagatggcacagacagataagtcagaggtggattgtgcctgcggcattcctgattcgggtgtaggtatggcgcttgggtatgccgaaggtaaaggagttccttatcatcgtgccatttccaaatatactccgacttggcctcgtagttttactcccagcaagcaagaattgcgttcgctggtggcaaagatgaagctgattcccaatcgtgccatgctcgagggcaagcgcttgctgttctgtgatgattctattgtccggggtacccagttgcacgacaatgtgaaggtgctgtatgagtatggtgccaaggaggtgcatatccggattgcttgtcctccattgatatatagctgcccgtttgtaggattcacggcttccaaaagcgacatggagctgattacccgtcgtgtcatcaaggagctggagggtgatgagaataagaatctcgataagtatgccactaccggttcacccgaatatgaaaagatggtggacgttatccgtgagcgtttcggactttcatccttgaagttcaatacgttggaaactctggttgaggctatcggattgcctaaatgtaagatatgtacgcactgtttcgatggtagcagccatttttgattgacaatttgtccttaaggaataaaaaaggggcgtgaattgcttggcagttcacgcccctttttttatctttacagcacaaaatagtgattaatgattagtgattaatgattaatgccattcggataatgcttttcgccaattactaatcactgaccattaatcactaaccattaatcactaatcattattcatcatgactttagtagaacgttttttaaagtacgtaagcttcgatactcagtccagtgaagagactggggatactccgagtactccgggacaaatggtgtttgcccggtatctgaaagaagaattggaaactttgggtctggaagaaatcacgttggacgaaaatggttatctgttcgccactcttcctgccaatacagacaagccgttgcccgtcatcggctttattgcccacatggatacaagccccgatatgagtggcaagaacgtttctccgcgtatcgtgcagaattatgacggtaaggacatcgttctttgcgccgaagagaatgtggttctttctcctgcccggttccccgaactgctcgaccatcaaggggaagatttgattgtgaccgacggcaagaccttgcttggtgccgatgataaagccggtattgccgaaattgtatcggcggtggtatatctgaaggagcaccccgaaatcaagcacggtaaaatccgtatcggctttaatccggatgaggaaatcggtttgggtgcccataagttcaatgtagcgcagttcggttgcgaatgggcctataccatggatggcggagaagtgggtgaacttgaattcgagaacttcaatgcggcctttgccaagataagtttcaagggacggaatgtgcatccgggctatgccaagaataagatgattaactctatccgcgttgccaaccgtttcatgtccatgcttccggctgacgaggccccggagcataccgaaggttacgaaggtttctatcatctgataggcattaccggtgaggtggagcagacaacagtctcttacattatccgtgaccacgaccgcgcccgctttgaagagcgcaagaaggagatggaacgtcttgtggcaaaaatcaatgaagaatacggtccgggtaccgctactctggaacttcgcgaccaatactacaatatgcgtgaacagattgaaccggtgatgcatatcatcgacaccgcttttgccgccatgaaggcagtaggtgtagagcctcgtgtaaaagccattcgcggaggtacggacggtgcccagctctctttcaagggcctgccttgtcccaatatctttgccggtggcttgaacttccacggccgctatgagttcgtgcctatccagaacatggagaaagccatgaacgtcatcgtcaagattgccgagctcgtagccagcaaataaataattcataactcataactctaatagttccatgaaaaccactccgtttaccgaaaaacacatctcgctgggtgccaagatgcacgagtttgcgggatataatatgcctatcgagtattccggcatcattgacgagcatcttacagtatgtcagggtgtcggtgtattcgacgtctcacacatgggagaattctgggtgaaaggtccccatgctttggactttctgcagaaagtgacttccaataacgtagctgccctcacaccagggaaagtacagtatacctgcttccccaatgacaacggaggcattgtagacgaccttctggtctatcattatgagccggagaaatacctgcttgtcgtgaatgcgtcgaacattgagaaagactggaactggtgtgtgtctcataacacggaaggcgcagaattggaaaatgcttccgagcacatggcacagcttgctgtgcaaggaccgaaggctattcaggctttgcagaaactgacttccatcaatctttccgaccttccttactatacttttacccacggtgagtttgccggagaaaaggatgtcattatctccaataccggatataccggcgcgggtggttttgagctttacttctatccggaagctgccatgaagatttgggatgccgtgttcgaggcaggcgcggagttcggcattaagccagttggtctgggtgcgcgcgatacgcttcgtctggaaatgggattctgtttgtatggcaatgatttggatgacaccacctcgcccattgaagcgggtttagggtggattaccaagtttgtggagggaaagaacttcaccaatcgcccgatgctggaaaaacagaaagcggaaggcactacccgtaagttggtgggatttgaaatgatagaccgcggtatcccccgtcatggttacgagctgtatagtacagacggtattgccatcggtgtggttacctccggaactatgtcgcctacccgtaagattggtatcggaatggggtatatcaaacccgagtacagcaaagtcggtacggaaatctgcattgacatgcggggacgtaagctgaaagctgtggttgtgaagccgccgttccgcaaacagtaatttgaataaatagttgagaatgaagaatttggctgcgcgatgatgccgcatgacaaattcttcattctttattcttagttattcctttctctatattctgcttatcctatccagcatttggtttgcccaacctatctctttattagtccattccttttcggttccttctatgccttggccttcgtagtccgaaagcaaggtgatatattctttcagtatatcggcggcttgggcttgtttgttcatgcgcatcaataatagtattttttgtttatatatgtccagattggggcttgttcctgccatctcctgggctttatcaagcatggcgaggcagcggttgttcacttcttccgtattagacagtgccatttccgcttttaccaggatgatgtagtcattgtccgtggctagtctgttgtcaatgttcttgcgtatcagccgggcggcttccttatagcgcttgttggcgtagttcatacttgcgttgaaagaaacgacatcgctggtggtccgtaggtaggggcgggcactcaggctatgggattcaccggccttttctatacgcttttgcaggtcgccgatgctgccgtagcgaggaatgtccttgctgcgttggtgcaggttgtaataccctataattttactgagagccgatgcgattccgtcgggattatagcccttgaatgccagaagttggcgcgcaaggcggtctgaagagatttcctgggaagttttgtatttcattcccaaccggtccgttgccggaatgctcaaaagggaagcgatggctccgatatctgccaccagactgacggcataagcatcttcattatcgtcccagtaggccacatcgagggctgcgctggcggtagtggcaaagacatctgcccaaaaagccgcacgcttggcacgccgctcggcacggtaaatgttgtttacctggtggtcgaggacgaaatgccccagctcacatgcgatgacggcagccagttcgtcttcggaatcaagagtgcagaggaggcccgtactgataaccatggagccgttgggaagcatgaaggcatctggttcgggcgactggatgatacgtatgttcaggttttctccacgattgctgtcaatggtggtggcattcagtttggagaatattccttgcacgtacgaggttatgtagtcgtcctgataggctatctcgttcagtttatcaagatagtccaggcattcttcgtcgatttcctggcgcagtttgtgcttgtagccgcggtcgttgaaatattcgtaaagatgattcttcaggtatatttgctgccagaattcccggtccgtttccggagcggatatggcaatgatacccatctcatccgaaggaatggtctcttgtatgccgttcacttcgacggcatagtaaatgttgtcgctgttttcaccgggattgttcattttgacaacccggcggataatgaccggggtaccggcgggagattgctggtactcttttgtcaattctcctttgatggcgatatttccgcttaagtccttgtgcttggatttggcaaatcctgccgttgtggcaaggattgtcaggatgaatagggtggcgagtcgtttcatgattatggtatgttttcggtttcgatgatacaaaaataggaaagtgtttttcccctttcttgttttttcccctattctgtgataggagattccctatttatcgctcagcgggaggcggaaacaaaaaagggaacctttcagtgaaagattcccttttttcagtttgcttgaaactgattatttcttacggttaccgtagcggctcatgaacttatcaacacgaccggcggtgtcaaccagcttagacttacctgtgtagaacgggtgagaggtgctggagatttccagctttaccagcggataagtttcaccttcgaattcgatagtctctttcgtgttgcaagtggaacgagacaagaatacatcaccatttgacatatctttaaatactaccggacggtaattttcaggatgaataccttttttcattttgatattttcttttaaaaatttatattctgttactattttggtaataaatagtgtaatggtcttcttttcagagcgcaaagatagtgcaagttggagactctacaaaataaattcagatttatttttatttagtaggtttatcgcattttatttctgatttttgcaggacttaatcttgtgaatttatgaggaaactacttgtcttatgctctttctggctgtgcgtggcaacgctgggggcacaaaatgcggaacggaaactgtatagtgttgcgttctacaatcttgagaacttatttgatacgattcatgatgcaggtaagaatgactatgagttcctgcctgacggcagttaccagtggacggcaaagaagtatgagtccaagctgcagaacctttccaaagtgttggggtccctttcgcgtgatttagtgccggaaggtccggcattcatcggtgtggcagaggcagagaacagccgggtgctggaagacctcgtgaagcagccggccatttccaattatgagttcgtgcattatgaaggaccggacagacggggtatagactgtgccttgctgtacgacccgaagcagttcagcgttacccactcgaagttggtgctttctactccttttgagggggatacggtgcacttgacgcgcggcttcctgattgtggacggacaactggcgggagagcgtgtctgcgtgatagtgaaccactggccctcccgtggggcgaagtcaccggtgcgtgtgcatgcagccaggcaagtaaaggccttgaaggactctctgatgcgtagcgacaagaagctgaagctcatcgtgatgggggatatgaatgacgacccgatggatgaaagcatggaggtgctgggtgcacgcaaatatccgaagcaggtgaagaaaggcgaattctacaatccctggtgggagacactggaagacaagggagtggggacattgctctatcggggcaagtggaacttgtttgaccagattgtcatttcgaaaccgttgctgaaggctaagaaagggttgcgctatgatcacaatgaagttttcatccgcgattatctgattcagcaggatggcaaatacaaaggttcccccttgcgtacgcatggaggcaggacttggctgaacggttacagtgaccatttgccgactatcatctatctgaaaaattagtattacataataatgtgtaaacagatgccggagagcaaacatgttctccggcttttttgttgatagaagtatagatggcaaaagtatggctggcagagataaatgcaaagagtttgtaatatagagattacaataatctgttaaatgaagccaatagctttaaaatagaatggatttggtaggatgagccggatattttattcctctcaagttctttactttaaaggataatgattacttttgcgtagaattttaattcactaacaataaaatttaaacaaaatggttaattacaaagatttaggactggtaaacacaagagagatgtttgctaaggctatcaaaggtggatatgctattccggcattcaacttcaacaatatggaacagatgcaggctatcatcaaggctgcagttgaaacaaagtctccggttattcttcaggtatctaagggtgcccgtcagtatgccaacgctacgctgttgcgttacatggctcagggtgctgttgagtacgctaaggaattgggttgcaaacatcctgaaattgttcttcacctcgaccatggagatacattcgaaacttgcaagagctgtatcgactccggtttctcttcagtaatgattgacggttcacaccttccgtacgaagaaaacgttgcactgactaagaaggtagttgattatgctcatcagttcgacgtaactgtagaaggcgaactcggtgtattggccggtgtagaagatgaagtttctgcagaacaccatacatatactaatcctgaagaagttattgacttcgctacccgtacaggttgcgattcactggctatctcaatcggtacttctcacggtgcatacaagttcaaacccgaacaatgccacgttgaccctgctaccggtcgtctggttcctcctcctctggaatttgccgttctggatgctgtaatggagaaactcccgggattccccatcgttcttcacggttcttcttcagttcctcaggaagaagttgatactatcaacaagtatggtggcaaattggaagctgctatcggtattcccgaagaacagttgcgtaaggctgccaagtctgctgtttgcaaaatcaacatcgactctgactcacgtctggctatgacagctgctatccgcaagacatttgctgaaaaaccggcagaattcgacccgcgtaagtatctgggcccggctcgtgataatatggaaaaactgtacaagcataaaatcatcaacgtgcttggttcagagaacaaattggctcaactggactaatcgaaagataatccgaatatagtgtcagcccttgcaatattgatgttgcaagggctgatttgttatatataggccggtgttgtgggatggttaagttcgccggttatttcagaagcggatgtttcaacgtgtacaacagtctgtttcctttaacaaaacagtctgtttcccttaactgaacagtttgtttcaataaagagaacacttcgttccaatatgcaaaaacacttcgttccaatacgtaagaacactttgtttctacatatctgaacactttgtttctctatactggaacaaagtgttcaccgttatgaactaacagattagctatatttgaggccggtgaaaggcatatccccgtgacacctattccatactaaaaatcccttgcagatagctggcaggcgaggtgtctgctagctatctgcaagggatatttgcaagaatgagctctctgtgtggagtgcgcgttataattctatcactaatgattctctggggcccatcttcagctcttcaccgaaggtgatggccttgccgctaagaatatcttttccctgcttgctgtcttttaggatttccttgtagaatttcaaaggaacggtggtttctgcatctgtaccgttcagcatcacgaatatcgtcttgccttcgtactggcgtgcgtaggcataaacaccattctgtaccatgaactgcaccatgctgcctttggcaatcacatcgtttcctttacgccagttcaggatggtcttgtagaagtcgtagcactcgttctgtatcttggtacgtccggctggggtcagtgcgtttgttgcgtcaccggtccatccgccggggaagtccttgcggacatagccgtcgctcttgctcttcacgccattcatcatgacttccgttccgtagtagagttgcggaatgcggcgggtggtaagcagcagggtagaggcttgcttcagcatcggaaggttgttgccctcgcccaggaagcggtcggtgtcgtggttttcgatgaatgccagtacggaagcggggttggggtagaggaagtcgtatacgaagttattgtatatgcggtccagtcccttgaaccaagtttcggtctgttcattcttggcggtgtttatcttgtcaaagaagctgaagtccataacggtcttgaggttactgttcttgggggctgatagcttggaatccttctgccaccaggcggtgtaggcgggttcggtaacccaggtctcgcccacggtgttgtagttgggatattcttcgttgagctctttcatccagttgctcatggcatcatagtcggcatacgggtaagtgtccatgcggatgccgtcgatgttggcgaattcaatccaccagaaactgttctgtaccaggtagcggtaaacgtgagggttcttctggttgaggtcgggcatggaaggtacgaaccagccgtcgttcatctggtcggcatcgtactgggaagtataagggtctacgtgcggggtcagtttgaaggaagtctgcacgaagttgttttcgtggtcggggttgttgaaccagtctttggagggcatgtccttaatccatacatgctctacaccgcagtggttgaaaatcatgtccattacgattttgatgtcgcgtgcatgggctttttcaatcagttgcttgtattcttcgttggtaccgaagcgcgggtctaccttgtagtagtctgtggtggcatagccgtgataggaaccgccggtcatgttgttttccagtaccggagtaaaccagagggctgtgacgccgaggtcggagaagtagtcgaggtgctgttcaataccggcaaggtcaccgccgtggcgggcgttgggatcgttacggtctaccttgtattcggccatgcctgcaatctggtcattgtccgggttcccgttggcaaaacggtcgggcatcagcaggtacagtgcgtcggaggcgtcgaaacctttatgttcgcaacctttcttgttgcgtgccttcagttcatattcctttacgagtttcttttttccttcagtgaaggtgaggttgaatttgccgggttttacatccttgtccagtttcagatagaccaggaggtagttgttgctttccagcttgacggtgctgctcaatgagacgccgggataattgacggatactgccgcgttgccgatgccttcgccatagaccatcagctggagttccgggttctgcatgccggtgtaccaaaacggagggtcgattttgttcacattcatagctgcatacgtactgagggagagtaagagtgttcccaagattaagaatacttttttcatgatagtaactttacggttaatttttgcgctaatttaaaacaaataacggagaaagttaatctttctccgttactgtaccttattatattatgcaaacgttttcattggggctatttgatgggggttacactggcggtatcgatctttcccttgaagaagtcctctttcttgcgcttttctctgatgtccttcagccagttttcggcggcattgtatcggttgtcttctccgatgatgggaactccgtctgcatctacttcctgcactttgtccttgctgtttttcggacgggttttcaggtaggccgttaggtatctctctgctttggacacatctttcagatagtaataatagacaaaggctgcgtcgtagagcagtttgtgtttctgtcggtcgtatttttcgtattgcgtcagaagggtatttgcctggtcggtgtattgaaatgccatcttgtagcagtccgcaagccccacatataggcgggacatgacactgtcgctgggcatggcgaggcttacggcagtttccagataagtcactccatcctctttccatgatgtcttggagcaggcgcgtcccagataatagagaacgttgatgttggtattgtcatctttgagagctctttccagcaggtcgtgtgcagggtagaagtcttcgagggcatagtagctgattccggcgtagaagcaggtttggaaggagctgtccttttcctgcaacagttgttcatatctctctattgctttggggtaatctttgttcaggcaataggcttgggcattgatgcggttcacaaggacgttggtggagtctatggaacggtatttctccgttatgtttatggcgttttcatactgatggcctgctacatagatgttgccgagtttggcagcagacaggtaatcattgggataccttttctgtatgtccaggtaggcatctatcacatgcatgatttctgtgttgtcatagacttgccccatactttcggctctaaggtgtagtacataggcggaactgtccctttctgccagcaggttgctttcctttagagactcacggtatctcttcatgttcatcagcagactgatatactggatgcgtgcgtatttattgtccgggtttatgtggagcgcattctggtagtaatccagcgcctcgctatatttggctagtgatttgcagcattcggcagcttcaatgtatgcccggggattgagagaatcctgagttacgacttcctgaaatacgctcagagcttcaaggttattgcccagccctttcagcgctttccctttttggtagagtagggggacggtcggggtttcttgatcgatcagcatcaaggctgtttcataatcgtagttggccatcgcctcttgaatggggtttgtggtctgtgccgccagaagtgaacagcatgcactgaaacataaggagataaaaagctttcgcatacagtatatcatttatatgaggttaaactgactgcaagttactaaaaagaatgtatttacgaaataatcgtaatctgttttagatagattaacgaaaaagcccctccaaaaatgatggaggggctttaaaatagttcggaattcaatccggataacggaatgaataaatgtattacattaagaatcccagcaggatacctgctgctacagcggaaccgattacaccggcaacgttcgggcccatggcatgcatcagcagatagttggtaggatcgtattccagacctactacttgggagatacgtgcagagtcgggtacggcagatacaccggcattaccgatcaacggattaatcttgttgcctttcttcaggaagaggttgaaaatcttcacgaagatgacaccggatgctgtggcaatgacaaatgataaggcgcccagaccgaatatcttgattgaatcaagggttaagaactcggatgcttgcgtagaagcacctactgtcaaaccaagcagaatagtaatggtatcaatcagcggaccactggctgtgtttgccagacgacgtgtaactccactttctttcagtaaattaccgaagaacagcatacccagcaaaggcagaccggatggtacaaggaatgtggtcagtaacaaaccgataatcgggaacattactttttccgtatgtgaaaccacacggggaggtttcatacggataagacgttcatttttactggtcagccaacgcataataggcggctgtatcaccggtactaatgccatatatgaataggctgataccgcaatggcacccattaagttaggagccagtttggaagagaggaagatggcagtcggaccatcggcaccaccaatgataccgattgcaccagcctgcattgggtcaaatcctatggcaagggcaatcatataagcaccgaatataccgaattgggctgctgcaccaaccaacattaatttggggttcgatatcaaagcggagaaatccgtcatggcaccgatacccaggaatatgagtggcgggtaccaaccggaggttactccctggtatagaatattaagtacggaaccttcttcatagataccgactttcaatccggcttccatattgaaaggtatattaccaatcagcataccgaaaccgataggaattaatagcatcggctcaaattccttggctacagccaagtatatgaaaaacaaacctaccagaagcattaccacatgtcctaccgttgcattggcaaaacctgtataagtccagaagtcggcaaggttgtttcctaaaaatgtgataaattctcccatattattcaataattacgaggtcagtaccttcgagaacagagtcccctttgtttacattgatggctgtaatcttaccgtctttatcagcattgatattgttttccatcttcatggcttccagaatgatgataacttgtcccttctttactgtatcgccgacatttactttgatatcgaggattacaccgggaagcggagattttacacctgacttgccggtagaagcagcggccggttttactaccggagtagcaggagcagcaggagcggatgtggctgccggacgtgctaccggtttaacgactaccttcggtgctttttccatttcaactttgtagggagtaccgttcacttctacgtgagcgatgttgtcttcaatatctccaatggcaactttatatacgttaccgttaattttatatttatattctttcatcgttttattttattatgggtgacttactttttgtgaggagtctcacgcaacgtataaatctttgaactccacggtgagtaactgcgttttacacgggtaatggtaagtatcgtgtcttccacatcgtgtacatcgctttggaattcgtgcatggccattgaaatggcagcaaaaacttctcccggagcctgccccagttgtttctcttttgcttcttgtttatcagtaatacctttagctttcatggcattgcgtttgctgaggttaactgatattttacctataatcttgaaggagatgtagagtaatatcagcccgcagaatacaacgctcatggcagaaatagccataccgatacctacgctgtcatgctcttcgaatttttccattttggcattgctgtcgatagtcttgttgttggtactcggagtgacatatttatcttcgcttccaccctttacttcccattggtcggctgcatcactgacacgggcataggattggttggcttttaaagtaccggcaggcactatgacttgatcaagcaatttcttgccggaatcatacaacccaatccagttggcatttgtggcatccagtttgaagttcgtatgaaatgtaccgcgtcttggttctccatcagcccagaaaagtgcatgctgacgtggttttatgagtgtcagaacgtcacctttgggaatgaaataactggcagtatcacccggctggctgctgaatttcagatagcaacctgcaaggtcggcgctgccgtatgatctgttgaatatttcaatccatgcgctgtgcacaccgtagtcatcctgatagttgctttcgttgttgaccagcacttcattcagcagcagtttgttgttcgatttctgttctttgcaagaagagcaaaagcctaacaccagcatcaatgaaaggaatattccgatttttgttttattcataatcgttcttgttttagtgtgaaaagcttgattacaagggaatattaccatgcttcttagccgggttagtcaatttcttggtttgcaactgttgcagggcacgaatgatgcggaaacgtgtgttacgcggttcgataacatcatcaatgtagccatatttagctgcattataaggattggcaaacaacttggtgtattcagcctctttttcagccaggaattgagccggattttcctgctctttggcttcgcgggcatataatacttctacagcacctgcaccacccattacagcgatttcagcagtaggccaagcataattcatgtcgccacgcagctgcttacagctcatcacgatgtgcgaaccaccgtaggatttacgcagtgtgatggtaaccttgggtacagtagcttcaccgtatgcatacagcagtttggcaccgtgcaggatgacgccgttgtactcctggccggttcccggaaggaatcccggtacgtctaccaatgacacgataggaatattgaaggcgtcgcagaaacggacgaagcgtgcgcccttgcgggatgcgttgctgtcgagcacacctgccagatacttcggctggttggcaacgatacctacggactgtccgttgaaacgtgcgaaaccgataatgatattctttgaataatctttttggatttcgaggaactcaccattatctatgatagcgccaattacctcgtacatatcgtacggtttgttcgggttatcaggaatgatgtcgttcagggaatcttccagacggtcgatagggtctgtgcagtctacataaggagcttcttccagattgttctgtggaatgtagctcaacagtttgcggataagagccaagccttcttcttcagtctgtgcagtgaaatgagtaacacctgatttggtggagtgaacgctcgcgccacccaggttttcctggcttacgtcttctccggttacagtctttactaccttcggaccggtaaggaacatgtaggatgtaccttccatcatcagcgtaaagtcagtcaatgcaggagagtaaacggcaccaccggcacaaggaccgaaaataccggaaatctgcggaatgacacccgaagcaaggatgttacgttggaagatttcagcgtagccagccaaggcattaataccttcctgaatacgtgcaccgcccgagtcgttgataccgatacacggagcacccattttcatggcttggtccataatcttacagattttcagagacatggtttcggacagtgaaccggcagaaactgtgaagtcctgtgcgaagacataaaccagacggccctcgattgtaccgcaaccggttaccacaccgtcaccggggtagtgtttcttttccatgccgaagttcgtgcatctatgttctacgaacatgtccatttcttcgaaactgccttcgtcaagaagcatggctatacgctcacgagctgtatatttacccttctcgtgttgctttgcaatcgctttttcaccaccaccgagacgtgctgcagcgcggcggtctataagctctttaatcttttcaagttgattactcatgaatttatattctttaagtgtttatacaatttatgatttgatgattttacagtcttgcttattccggtttctcgcaaagctcggtcaggacaccgagagttgacttcggatgcaggaatgcaatgttcagaccttctgcacctttgcggggagctttgtctataaggcggatacctttttcttcgacttctgcaagcgcaccggccactccgtcttcaacggcaaatgccagatgatgcatgccaccgttaccgttgttcttttcgatgaacttggcaattgtgctttcgggagaagtaggttccaacaattcgatctttacatcgcccactttcaggaaagcggttctaactttctgatcttccacggtttcgatgttgtagcatttcaaacctaaaacgttttcgtagtacggaagggcttcttcaatgctcttaacggcaatgcccagatgctcaatgtgtgaaatcttcataactatataaattaatgttagtattgtatcctttttaataaaggtataaagcagcacaaagaaagagaattcttccttaataaagaaatttttcatcaattaattcatggataattgaactttagaaggattttttcagactttagatagagaccggttgttttcctaatatcgtccgctaacggacatccccactgtccgaaaatgaacacttacccctctatgaaaccttcccggccacttggcacactctttgcttttctgtttgcgacaattttaaagattgaacatgaaaaagaatattttacttgcagtttgttttttgatgccgttggcaaccatggcgcagaatgatactttgggacatgaacgcaatattacgctgtcggaggccattgtactggcccgtacgcagtctgtggatgctgctgtggcattgaatgaattgaaaaccgcgtattgggaataccgtacattccgtgcggacttgttgccggaagtgaatttcaccggtacactacccaactataacaagtcctacagtacctaccagaattccgacggctcctatagctttgtccgcaacaatacactggggctgtccggccagctttcggtagaccagaacatttggtttacggggggtaagctgtcactgacttcttcgctggattatctcaaacaactgggttccggaggagcgaagcagttcatgtcagtccccgtgagtctggagttgacgcaaccggtcttcggagtgaataccttgaagtggaaccgccgtatagagcccgtacgctatgccgaggcaaaggccgagttcatttcagctacggaagaggtgacgatgaaaaccatcacttatttctttgagttgctgctggccaaagaatcgctcgctaccgccatgcagaacaagacgaatgccgaccgcctttatgaagtggccatagccaaacgtaagatgggacagatatccgagaatgatttgctgcagcttaaactgaattcattgcagggcaaggcggacgtgactgaggcagagagcaacctgaatgcaaaaatgttccagctccgttctttcctcggggtgtccgagcaggaaagcttgaacccggtgttgcccgccactgttcctgatataaagatggactatgaccgcgtgctgaacaaggcactggaacgcaactcctttgcacagaacattcgccgccgccagctcgaagctgattatgaagtggcaacggcacgcggaaacttgcgcagcatcgacctctttgccagtgtgggctatacggggcagaaccatgaattctcttcagcctaccgggacttgcttgacaatcagattgtgcaggtaggcgtcaagattcctatccttgactggggcaagcgccgcggcaaggtaagggtggcaaagagcaaccgtgaagtggtcttgtccagaatccgtcaggaacagatggactttaaccaggacatctttttgctggtggctaacttcaacaatcaggcgcaacagctggacatagccgaagaggcggatgtcattgctgagaagcgttacaagaccagtgtagagacctttatgataggtaaaatcagcacactggacctgaatgatgcacagaactctaaagacgaagcccgtcaaaagcatatttcagagctgtattactattggtattacttctatcagcttcgcagcttgaccctttgggattttgaacgcgatacggaattggaagctgattttgaagaggtggtaagaggataagccgacgggttgcaagtgataagttatgagttattcgccggtaaaagtgccgtatatgcgatattattggtaaataacttataacttatcattcataactctgcttttttacttatttttgtggaaaataaactgcaattttatgatactgataatagacgacgatagtgctgtgcgctcttccctcagctttatgctgaagagtgccggatatgaggtgaaaacgtctccaagtcctcgcgaagctatggacatagtgagggccgaagctcccgctttgattttgatggatatgaacttcactctttccactaccggagaagagggacttaccttattgaagcaggtaaaggtgttccgtcccgatgtgcccgttattttgatgacggcatggggaagtatccagcttgccgtgcagggtatgcaggccggcgcattcgatttcataaccaagccttggaacaatgctgctcttttgcagcgcatcgagacggcccttgagcttacggccgccccgaaagaggtgccggaagagcagactaccgcattgaatcgcagccatattataggtaagtccaaagggctgatggaagtgctgaacacagtggctcgcatagcccgtaccaatgcttcggtgctgattacgggcgaaagcggaacgggcaaggagctgattgccgaagccatccatatcaacagccaacgcgtgaagcagccctttgtcaaggtgaaccttggtggcatctcgcagagcttgttcgagagcgagatgttcggccataagaaaggggcgtttaccgatgccagcgccgaccgtatagggcgttttgaaatggcaaataaaggtactatcttcctcgacgagattggtgacctcgacccttcctgccaggtgaaactgctgcgcgtgcttcaagaccagacattcgaagtgctgggcgatagccgtccccgcaaagtcgatgtgcgcgttgtgtccgccactaatgcagacctccgcaagatggtgtccgaacgtactttccgtgaagaccttttttaccgtatcaacctgattaccgtaaaactgccctccttgcgggagcgccgtgaagatattcctttgctggcacgtcactttgccgaccgtcaggcagaggtgaacggcttgccgcgtacggatttctcggccgacgctctgaatttcctttcccgcctgccttatccgggcaacattcgtgagttgaagaatctagtggagcgtaccattctggtcagtggcaagccggtgctggatgccacggatttcgatgcccaatatctgcgtcacgacgaaccggccaaagctgccgaaggtacttcttttgcaggtatgaccttggatgaaatagagcggcagactatcttgcaggcgttggaacagcataaagggaatctcagtcaggtggcagtgtcattaggcatcagccgcgctgcgctttacagacgtttggaaaaatataatattcaagtcccgtgcgcataaaattctttttcttcatacttgtcctttttctgctcggtctgggtggaatgctggtatatttgctgagtgggaagccgcttttgtatctgtacgtattggaggggctcatcgggtttatccttatctatctgatagtattctataataagatagtgaagccgatgaacaccataggcagcggtatggagttgctgcgcgagcaggatttcagtagtcgtctcagccgggtagggcagtacgaggcagaccgcattgtgaatatctttaaccgaatgatggagcagctcaagaatgaacggttgcgcatgcgcgagcagaatcacttcttggatttgctgattcaggcatctccaatgggggttattatcctgacaatggacgatgaagtgtcgcaactgaatccgatggcggtaaagatgctcggtgtccgtatggaggaggcgatggcaaagcggctggaccagatggactccccgttggctgccgaactttcgtccattcccaaagacgagacggcagtggtccgtctcaatgatgcgaatatttataaatgcacccattcttcttttattgacagagggttcaaacatccttttttcttgatagagcgtatgacggaagaagtgatgcgtgccgagaagcgtgcctatgaaaaggtaatccgcatgatagctcatgaagtgaacaataccactgcgggcatcacttccacactcgatacagtggagcaggcactttctacagaagatgatatggaggacatctgcgacgtgatgcgcgtctgtacggagcgttgtttctcgatgagccgtttcattacccgttttgcagatgtggtaaagatacccgaacctaccctggcacccgtccaactgaatgagttggtgtccatgtgcaagcgtttcatggaaggaatgtgcaatgaccgcaatatagggctacgtctggaatgcgacccggaggtgggaatggtgcgtatggatgcttctctttttgagcaggtgcttgtgaatatcatcaagaatgctgctgaaagtatagagggggatgccggagaaaacggacagcaaggtgagataatagtaaggaccactgcccccgcttctgtcgaagtcgttgacaatggtccggggataagtaaagagaccgaagctaaactcttcagccccttcttttccaccaagccgaacgggcagggaattggcctggtgtttatccgggaagttttgagccgtcatggttgcacgttctccctacgtacctacaacgatggattgacccgcttccgtatactatttaattgaaatttgaaggttttacctttcacctttcaattttcaatttttacctttcgtctttccatttttaaagaattcttttgcatactcctccagtatctttttaatgccttggccgatggttgcatagtctttctcgtccagattggcgagtgaggcgcgtacgctccattcggggccgtcaaaaccaccgccgttcagcagcaccagagaggtttctttggcaaggcggaagactacgttcagcgggctgtaggtacgtttcagatattctacaaagtcgtccccatagaacttctttgcccaaaccagcatgtcgatttctgtataataacctacgcgcaacgggtcttccgtcagcgtgaaaccggtattctcccaaagggcatgcaatcggcggcggataatctcctgcatcttttgcttgtatttgttttccttgtccagcagggcaaaggcggcgaaaaggcccatctgcatctgttgtggcaatgacagtccggcggtatggttcagtgccacctgacggctgtcggcaaccatacggtcgataaacttcagtctttcaggttccagagtgagggtggagtagcggtggtgcagaatctcccgtttctctttcggcagtttggctatcagcttgtcgaacaggttgaattcgtgcagggcaatgaccgcattgcgccatccggtggcaccgaagtatttggagaatgaatagacgcaaagcgtattgtagggaatttctgccatgaacgaacggaagtgcgaactgaatgtaccgtatacgtcgtctgtaataatcatcagattagggttgtcatttctgacgatgctcacgatgcgcgccattgtatccggactgagtgtgtagctgggcggattactgggattggtgacaaagagggccttgattttagggcttttcaagcggtctatgtcttcgtcgctgtactgccagaggtgcatcccttcgctattcatgcggttggcatgtattttggtcactcgaaactggtagcggctgagttgtgggatttcaatatagggggtaaaggcaggaaccatgaggacgatgccgtcccctttgttcagcaggaagttttcctgcagggagtcgaagatgtagcacatggcggctgttccaccttcggtggcaaacaggtcataggcaccccggggaggacggttgtcgcacatctcttgcgaaaggtaatcttgcacaaggatttccgtaaaatgaaggatgcggtcgggcacgggatactgatcgcctacaatgctttcggcccattcgtgtacaaggctgtcggggtcggcggcatgctgcatcagcaggtagttgtaggtttgttccagcaatttggcgcccggtacgttattgttctttttcaggaaggcttcgaagtgggaggcaatgccttttttttcggggatgcctgcaatgccctcgggcaaatccatgatgcgacggcactcttccaagccgaagcttcccaataggaaaaaggcctcgcgtggagcggttgcaatccagttggggttgccgcgccctgcgttcagcatggtacgggcggttttcttcagactttcgtctgccatgtctatcaggcggttcttcagttcgaaaggactgatagattccattttcttttctaaaagttttgtatccataagctcaagtttaggttcgttatttattgttttcagtcattcggtgaataatctttgttcatgtggcatactatttctttccttgcttgaaattaatcgtccgatatatgtttccttttcgtccgacagttgttgaatcatcgtccgacaactgttgaattatcgtccgacagctgtcggacgaatagctattagtgaatgggtatatagtcgcttgcatttccggcaataattctttgaatgctctggattagtaagcattggtacagaatcgtcttatattagcaaaacgatgactacaccccatattattaataaggtattgcccacggcataggtcacggtgtatcccagagcaggcgtttcgctctcaacggcatcctgcaccgcgcctaaagcggccgtagtggtacgtgcccctgcgcagacgcccaaagccagtgccggatggaacttgaaaacataccttgccagcagcaagccgataatcagcggcagggtggtggctgctgctcccaccagaaacaggctgatacctacgtcgtggaagccctgcacgaaactgggacctgccgaaatgcccactaccgcgatgaacatgttcagaccgacattgttcaacacccattgtgaaggttcgggaatgcgcccgaaggtggggtgcttactgcggagccagccgaagaacaagcccgcaatcaatgcgccgccgcttgtgctcaagctgatggggatgccgccgatatggacggaaagtgctccgaacaaacctccgacaaggatacccaggcctacgaatatcatatccgtctggttggtaggacggtctatataccctagacgtttggctgctgcttccacttcctgcctggtacctaccacttcgatgacgtcgccggcatctactaccgtttgtgccagcacgggaatggatattccggcgcgcttgatgctccggatactgacaccgtgcatgaacttttcccttcggatagctgcaaccgtcttgccggcaaccgtcttgcgtgtgattgtaaccggtaacttttcggcaggaaaatccaggagctgggcatcttgtacttccggccctatccagctttcttcgcctatgatgtattcgcggcgtccgcttagcactacttcgtctcccggctctatctgtatgttcatgctgacttccaccacaactccggatttgcggaggcgttccacaaatagacgtttgtcgtgctgccggaagtagacttccaggtcaatcacccgctttccattcttgaaccactcgttttcgacccggtaggcacggaaagtgacggggcgtgccgccggcatgaatcccggttcgtcagccagagagctgcccatcttcgcctccagctccttgcaggcggctttcaccttttccagcccgcccagcatcttgggaccgatggatgataggacccatgccgagcctgccgtaccgaaaatgtaggtgacggcgtaggatacgggaatgatgttgacgtaactttgtcgttgggcctcgtccagtcccatattggccatggtgtcttctgccactccgatgacggcggagatggtttgcgaaccggccagcagtccggcagcttcaccggcattgtagcccatcatcagggccagcagccaggtcactaacagtacggatacacacatcagtacggcaaagcccacttggggcaatccgtcctttttcagtccgcggaagaactggggacccactttatagcccacggcaaaaaggaaaagcagaaaaaataccgactttatcggacccggtacggctatgttcagttgccctaccagtacgcctacaagcagtacactggtcactgtgcccagcgtaaacttaccgatacgcagtttccccagccagaatcccaggaatatagtgaggaaaatggcaagttcggggcgttccctgagctggttgaaaatccattccataatcaagttgtttaggttatatattggttgttccgatgctttctggagcgtcgtttcgctatacaacggcttttaacgggaagtgttttatacaaaaggagttttttagaacatttattccgtaaaaccgaactttaagaaaaagttttcttccgtacctttgccatccaaattaggtaaaacaaggtatgaagttgttttttagggtatttctgcttatccagctggttactcttccattgagagcacaatatatggtgcaaggcgttgtcaccgattcgttgacgaaggagccattgccttatacgtcagtttatctgaaaggaactacggagggagggatgacggacaataacggccgtttttccttcaagacctatcgcccggaggccacgctggtcatttcggccgtgggatataatgaatatgtccggctgattcatcctgcaaagtcttctaagttcaatatagccctttcgccagccacttatgcactggatgaggtggtggtgaagccgaagcgtgaacggtataagaaaaaggataatcccgcagtggagtttgtacgcaagatgatagagcatcgggatgactactcgcccgacgaacgcgacttctggaaacgtgaccgctatgaaaagatgacttttgctatcaataacttcgacagcttgaagcaacagaagtggctttaccgtaagttcaagttcctgacggattatgtcgatacctctgccgttaccggcaggccggtactggccatctccaaccgtgagttgcttgccacagactattaccgcaagtctccgcatagccggaaacagtgggtcaccgcccgcaggcaggcaggagtggacgagatgctttcccagcagggtatggagcaggctatcagtgtcaccatgaccgatgtagacctttatgagaacaacatcaccttgttcaccaataagtttgtcagtccgctatcctcccttgggccgtctttctacaaatattatctgatggatacgcttaccgttgccggaaagccttgtgttgacttgacatttgtccctttcaactccgagtcgttcggttttacgggacatttgtacgtcatgctggacagtacctattttgtaaagcgtgccgtcatgaactttcctcagaaaataaatctgaactttgtggactacatgaagattgaacagaattttgaccgcgcggaggacggtacgaggcagttgctcaatgagagtatcactacggagttcaagttggtggacaatagtgacggtatttatgccaagcgggatgtgtattacagaaattatcagtatgaaccggatgacaaggctctgcaggctttccgaaaaccggaaaaggtgattgaagagacatcggcttccggctattcggaagcatattgggatgccaaccgccaggtggaggtcagcaagaaagagacttcggtggacaagatgatggcccagttgcgcagctatcccgtttatttctggacggagaaagtgttgaaggtgctgttcacggggtatattcccgctccgaaggaaaaagaacctttgttctatatcggtatgatgaataccactatcagcggaaatacattggaaggggtgcgcttgcgtgccggcggtatgacgacggcatggctcaatccgcatttgttcggcaggggctatatggcatacggttttcgcgaccatcgtgtaaagggactcgccgaactggagtattcttttcataggaagaaggaatatgccaatgaatttcctatacattcgttgaagctccgttacttgtcagatgtcaatcaatatggacaacactatctttataccagtcaggacaatgtttttcttgctttgaaacgtcagaaggatgaccgtatcggttatcagcggaaggcggaactgacctataccaatgagttccattccggtttttccgtacagatgacgacgcgtttgcgtaaagatgaatcatcccatctgattcctttcgtcaagcaggacgaccataatacgtatgtaaaaagtatttcgaccagtgaactggaattgaagctgcgctatgctcccaacgagaaattcttccagacccaatggaaccgtttccccgtttcgctggatgctccggtcttttcgcttacacataccatggctgccaaaggggtactgggaggagactatacctatcactatacggaagcgggttttcaaaagcgtttctggttctcggcattcggttatacggacgttatcctgaaggccgggaaagtatggaacaaggttcctttccctttgctcgtcattcccaacgcgaacttgtcctataccatacagcccgagtcctattcactgatgaatgccatggaattcatgaacgatgaatacgcttcctgggatgtgacctattacttgaacggctggctcttcaaccgtattcctttgttgaaaaagttgaaatggcgtgaagtgctttcctgccgcggtttgtatgggaatttgagcgataagaataatccggcttttcagcaggatttgttccgttttcctgccgggagtaccaccatggggcatacgccctacgtagaggcaggcgtaggcattgaaaatattttcaaggtgttgcgtgtcgattatgtatggcgtctgacttaccgaaatttaccggatatagacaaatccgggctcagaatcagtctgcacatgacattttaacttaaatcttactaataggacattaaatcggataaaatgactaatcccaattgagtaaaataccctaaatttgagcaattttttaaactctaaataatacaatggcaatgaaagaaaacattaagccggcaaccggacgcctgggcgtgctggtagtcggagtaggtggtgcggttgcaaccaccatgattaccggtacattagctgctcgcaagggcttggcaaaagctataggctcaatcacacaaatggctgctatgcgcatgcaggatggcaaagaaaaacttatcaaagacatagtgcctttggctgatttgaatgatatcgttttcggaggttgggatattttcccggacaacgcctacgaagctgctatgtatgctgaggttttgaaagagaaggacttgaatctggtaaaagatgaactgcaagccatcaagccgatgcctgctgcattcgaccacaatttcgcaaaacgtttgaacggtacgcacattaagaaggcagctacccgctgggaaatgacagagcagttgcgcgaggatatccgtaacttcaaggcagccaataactgcgagcgtattgttgtgctgtgggctgcaagtaccgaaatatatattccgctgtccaaggagcacgaatctctcgctgctttggaacaggcaatgaaggaaaacaatactgaagtaatctctccgagtatgtgctatgcatacgctgccattgcagaaggcgctccgtttattatgggtgctcctaatctgtgtgtggatactccggctatgtgggaattctccaagaaaatgaatgtgcccatttccggtaaggacttcaagagtggccagactttgatgaagacggtgcttgctccgatgttcaagacccgtatgttgggtgtaagtggctggttctctacgaatattctgggtaaccgtgacggcgaggtactcgaccaaccggagaacttcaagacaaaagaggtcagcaagctgtctgttatcgacaatatcttcgagccggagaaatatcctgacttgtacggtgatgtttatcataaggtacgcatcaactactatcctccccgtaaggataacaaggaagcatgggacaacattgatattttcggctggatgggctatccgatggaaatcaaggtcaacttcttgtgccgtgactccattcttgctgctcccatcgcgctcgacttggttattttcagtgatttggcattgcgtgcaggcatgtgcggcattcagacgtggctgtccttcttctgcaagagcccgatgcacgatttcgagcatgagccggtacacgatttgttccagcaatggcgcatggtgaaagagactctccgcaatatggtgggtgagacagcaccgagttatctggactaaaaaaacagtgataaggtgataaaaataaggtggtaaggtgatagagtgatagcactttaccactttatcacttttattactttattgcatttatcattttaccgtttttatcgcatttatcacctcattacttttttgatgaagaaaccctccctcctcccagttattatcggtacgggctttggctcgggcttttctccttttgcacccggcactgcgggagctttgctggctacgcttatctggttcgggttgtcttatctggtttcaagtgtctgccttttgtggctgacagtagcattgattttggtatttacgcttgccggtatctgggctgccaaccgcctggaggcatcttggggcgaagacccttcgcgcgtggtggtcgatgaaatggtcggcgtgtggattgccttgcttgcggcgcccgccggacatgtatggtatacattgggagcatttgtcttgttccgtttgtttgatatattcaagcccttgggcatccgccgtatggaaagtctgccgggtggaataggggtaatgatggacgatattctgtccggagtctacggatttataattttgattgtggcaagatggataatctgttgaaatcaaatggcaaaggtgtgtcgtggcgccattctgtctggatcttcttcaaggcccaaatttctgcgcaattcgcaagctttgtcgattttctggtgactatccttctggtgaaggcttttgctgttttttatctttatgccacattcacgggttccgtagtaggaggcattgtaaactgtgccattaattacggatgggtgttccatgccgaagactgcaagaaaacgcatgttgccgtcaagtacctctttgtctggggaggcagcattatactgaatacttggggtacttttgcactgaccgagtggcttacccgcatgacatgggtcaatggattgttgggatattatatagacaatgtatttattctgtcaaagataattgtagcagtgctggtagcttttttttggaactaccatctgcaacgttttttcgtttatcgtaatcacaatataaaaggctttctgaaacattatttagagaacaaaaaagacgaatatgaattatagagattggttgcagcaggtgatatacaagattatcaaccctgtggtgcatggtatgattagaattggcattacgcctaactttattacgactacggggctggtactgaatatcgtggcggctgccttgtttgtgtatgccggggtgtacaaaagtggtgaactggcctatgtgggctggggaggcggtattgtgctctttgccgggttgtttgatatgatggacggacgcgtggcacgcgtgggtaaaatgagttctactttcggtgcgctgtacgactccgtactcgaccgttacagcgagctcgtgacattgttcggcatcttctattacctgatgctgcaaggctatttgtggggctccatcattacattcattgcgctgataggttcgctgatggtgagttacgtgcgtgcccgtgccgaaggtttggggctggagtgtaaagtcggtttcatgcagcgtcccgaacgcgttgtgctgactgccctcggtgccatgttctgcggtatctttggtgattgtaccttgttcgacccgatgctgatactaattgtgcctatggcagtgattgcaatattggcgaatttgacggcatttgctcgcttggcgcattgctataaactactgaaagacaaggaatgaaaaatagtttgtttccctctgtgagagaggcggtgctggtgattgtcatcacagcgtttttcctgattctgacagcggtctgtatcgggcttcgtccggaacatttcctgatggcgggtgtatttttggtattgttctttgctggacagacaacccgtaagttggcagtggcgctgttgccgtttttcatattcggcatttcgtatgactggatgcgcgtatatcccaattaccaggtgaatcccattgatgtaaaaggactttatgagacagaaaaatccctttttggcttgtctgtagacggtgctgtcctcatcccttgtgagtattttgctttgaaccattgtcctgttgccgatttctttgccgggatattctatctctgttgggtaccggttcccattgcattcgggttgtggctctatctgaagggtgaccgtaaggtatatcttcgttttgcgatggtgttcctgctggttaatctcatcggttttgccggctattatatccatcccgctgctccgccctggtatgccatgaattatggtttcgagccgatactcgacactccgggcaatgtggcaggcttaggacgttttgacgaattgctgggatgctccatcttcaactccatttacggaaggaatgccaatgtatttgcagcagtgccctcgctccatgccgcctatatggtggtggctttggcctacgcggttatggaccgcagcaaaaagtggctgatagcgttgtttgcggtgattatggtcggtatctggtggacggctgtctattcgggacaccattatctgattgatgtgatgctgggcatctcttgtgcattgctgggtatttttgtttttgagaaaggactgatgaagtggggagcgttcggacgcttctttgaaagatacagtcgatacattaaataaggtatacaatgaataattttgttttttatagtcctacagagtttgtctttggcaagaatactgaagtgcaagtcggtgcattggcgcgtaagtatggtgcacaaaaagtgatgatagtatatggaggcggttctgttgtacggagtggtctgctggatagagtgaagcaatccttgcaggaagccggtgtggcttattgcgaaatgggaggtgtccagcccaatcccattgacgggaaggtatacgaaggtattcagctttgccgtcgtgagcaggtggatatgatgcttcctgtgggaggtggttcggtcatagatacggcaaaggccattgctgccggagtcctctatgatggtgacttttgggatttctttatcggtcgtgccaaggtggagaaagcgttgaaagtagccgtggtgctgactatcccggctgccggaagcgaaggttcgggcaatacggtaattaccaagacagagacactccaaaaactggggctctgtgcccccgagcatttgcgtcccgtattttccatcatgaatcctgaactgacctacactctcccagcttatcagacggcttgtggtattgccgacatgatggctcacatcatggagcgttatttcacaaatacaccggatgtggaaatcagcgaccggctttgcgaaggcaccttgacagctatcattaaagaagcttaccgggtgaaacagcaaccggacaactatgccgcgcgtgccaacattatgtggtgtggcactgtggcgcataacggaacttgtggggtagggcgtgaggaagactgggcatcccatgcactggaacatgaaatcagtgctatctataatgtagcccacggtgccggcttagctgtaatcttccctgcctggatggcttttatggcagaacataatccggcaaagatagcccagtttgcccatcgtgtttttgatatacccaagtccgaagatttggaagagatggctttggcaggtgctgcccgactgaaacactttttccgttacatgggcttgccggttggctttaaggagttgggtatcgagcatcccgatatagaccgtatgctcgtcagtctgcggcgcaataaaggcgaactgcttggcaactacgtgaagctgaccatgactgattgcagggaaatctatcgtttggctttataacgaaaggcatgtttggggagagctccccaaaagcaagagctaaaaaagacggcgaagataaatacccttcgccgtcttttttatttgatttcgatttcttccttcatgtctatctcttccccttgcaggtcgtagaatacatattccaggaatgctaatttctggtttggaataatcttgataccgaatccgtacttcatctgccacttccgtttcagggagacgagtccctgattgacgtaggctgcgatgtacgggtggatgtgtaacgagaatttctttatcttcaatttgttgaccaggtagtcaatcttactctctaaggtgtccgtaaagaggatggacgatttgatggtgcctttaccgaagcaggtggggcaggtttccgtcgtatttacatccatagccgggcgtacacgctggcgtgtaatctgcatcagtccgaatttactgagcggcaggatgttgtgacgtgctctgtctttctgcatgttggcacacatacgttcgtaaagcttctgtcggttttcggcttcattcatgtcgatgaagtccaccacgatgataccacccatatcccttagtctgagctggcgtgccagttcgtcggctgcgcccagattcacttccagtgcgttggcctcctgcccgttggcattcttggtgcggttaccgctgttcacgtctactacgtgaagcgcctcagtatgctcaataatcaggtaggcaccacttttgtatgaaatggtcttgccgaatgatgacttgatttgtttggtgataccaaaattgtcgtaaatggggagttgacctttgtacagcttcacgattcctgcccgttcaggggcgatgagggttacgtaatccttgatttcgtggtacacagcctcgttgttcacgtggatgttttcgaaggaaggattgaacaagtcgcgcaacagtcctacggcacggctggtttcttcgtaaatcagtgtcggaaatttggtggccttctgtacttttgtaatggcatcttcccaatgtttcagtaatactttaagctctccgtcgagttcggcaacacgttttccttcggctacggtgcggacgatgacgccgaagtttttcggcttgatactcatcagcagttgcttgaggcgtgcgcgctcttcgctcgatttaattttttgtgatacggaaaccttgtcattgaagggaatcagcacgaggtatcttccggcaaaggaaagttcggaagtcagtcgcggccctttggtagagataggttccttgacaatttgcaccactacttcttgtcccaccttgagtgtgttggaaaccgttccgtccttttcaaggtcgggaagtatggttgctttggtaatgggattcagcttcttcttgtcgcttaaagtttgctttacgtacttctctaacgagttaaattgaggacctaggtccagataatgaagaaaagcgtctttctcgtaacccacgtccacgaagcaggcattcaggccgggcatcaattttttgacgcgtcccaaatacatgttgcccaccgagaaggagatgtttcttccttcgctctgaagttccaccagctgcttgtcttcaagcagtgcaatggatacctctttgggctgtacgtctacaacgagttcgcttgtcacaataattggcttttaaatgattctatttactacttaaacaaagaacaaacccgcgagacattttgcttcacaagtttgttctttattttgtccttcagactaaaaattactttttgcttttatgtctgttctttcttagtctttttttacgcttgtgcgtagacattttatgtctttttttcttctttccgcttggcatagcttcaaaatttttatgggttaatactattgtttattatttcttcactgagagggtgaacgtttttgcaggcttaaatgccggaatgttatgttccggaatgattattgtagtgttcttggagatgttgcgtgcagttttctgagctcttttcttcactacaaaactaccaaacccgcggaggtaaacattttcatctttggataaagatgcctttactgcgtccatgaatgcttcaacggttgtaagtacggttgtcttatcaattccggtgttctttgtaatttcgtttacaatatcagctttagtcatttttctttaaaaaaaatattattactatagttttcctaattttttggactgcaaatatatagcttttccgtggctctaaaaaatatatttcggacaattttctaaaaaagtcttggcattaagctttgttaggctgaaaatgaagtatttttgcagcatgaatatttttagcggaacattgttggattggtatgcggagaacaaacgcgaccttccgtggcgaaataccacggacccttatctgatatggatttctgaaatcatcttacaacagacaagagtggcgcagggttatgagtactttttgcgtttcataaaacgcttcccggatgtggcgtcgctggctgctgcgtccgaggacgaagtgatgaaatattggcagggcctggggtactattctcgtgcccgcaacctgcatgccgcagccaaaagcatgaagggtacatttccaaaaaactatgcagaggtgcgtgctttgaagggggtaggggattatacggcagcggccatctgttcttttgcctatgacatgccttatgcggtagtagacgggaatgtatatcgggtgctttcccgttatttcggcattgatattcccattgattctaccgaagggaaaaaaacttttactgctttggcgagagagatgctcgataaatcccgaccggcagattataaccaagcgattatggacttcggagccgtgcagtgtatgccgcagtcgcccaactgtctgttctgtcctttgtctggtagctgcagagccttgttggaaggcaaagtgcagcaactgcccgtgaagcagcacagaacaaagactaccaaccgctattttaattatatatatgtacgtatgggtgcgcatactttgatacataagaggacggagaacgatatctggaaaaatctctttgaattgcctctaatcgaaacggaaaaagatttatccgaagaggagttcctggcatgtccgcagtttcatgcactgtttgcagagggagaggtgcggatggtccgtacactacttcggggagtgaagcatgtattgtcccacagagtgatttataccaatttctatgaggtcactctacccgataattcgggttctttttcaggttaccagcaggttgcggtcgaagatttggaccgttatgcggtgcctcggctgatacatgctttcttggagaaatatatataaaagttgtctgtattcttgcatggtgtggatattctcgttaattttggcagcaaattaataaaatagaagcttatgtcagtaaacaaggtgatattgttaggaaatgtgggcagagacccggaagtgagataccttgacagtggggtggcggtagctactttttctttggctactacagaaagaggatacactttgcagaatggaacccaggttcccgaccgcactgagtggcataatattgtgctttggcgtggactggcagaaactgccgaaaaatatgtgcataaaggagataaactttacattgaaggtaaaattcgcactcgctcgtatgatgaccagacaggagctaagcgctatgtgactgaagtttttgcagatacaatggaaatgttgacacctaaaagtgcatcggcatcgggcaatgcgccgtttgcgccgcaagccggagcgacagcccagccgcaacaaccggtacaaccgcaggctgcccctgcacaagataacccgacggacgatctaccgttctgattgtttaactaaaaccaaaatctttggacccagacgcttatttatgccagttggcagatgtttttaacggtatatccgtacagactccttctatttcggccattgtagccattgtgttggcaggtttgcttttgctcgtttccggctttgcatcagcttccgaaatagcctttttttctctttctccgtcagacttaaatgtaatagcggagagaaagcatccttcggatgagaaaatcagtaatttgctggataacagtgaacgtttgttggcgacgattctgattacaaacaacttcgtgaatgtaaccataatcatgctctgtaacttcttttttatgaatgtgttccaatttcattctcccattgcagagttcctcattctgacagtagtccttacgtttttgctgttgcttttcggtgaaatcatgcctaagatatattcggctcagaaaacgctggttttctgccgttttgctgctcccggcatcacgttttgccgttccgtattctatccgatggcatctatgctggtacgttccacttctttcctgaacaagcatgtggtccgcaagaaccataatatatcggtcgatgaactttcacatgcactagaattgaccgataaggcggaactttcggaggagaacaatattctggaaggtatcatccgctttggtggagagacagccaaggaggttatgacttcccgcctcgatgtggtggatctggatattcgtacccctttcaaggatgtggtgaagtgcattgtagagaatgtctactcccgtattcccatctatgcggataaccgtgacaatatcaagggggtgctttatatcaaggatttgcttccccatctgaacaaaggggataatttccgctggcagtcgcttatccggcccgcctattttgtgcccgaaaccaagatgattgatgatttgctgcgcgattttcaggcaaacaagattcatatagccattgtggtcgatgagttcggcggtacgtcgggcattgtcaccatggaggacattattgaggagattgtgggcgaaattcatgacgaatacgatgatgaagaacgtacatatgccgtactgaatgaccacacttgggtatttgaagccaagacccagctgaccgatttctataaaataacgaagatagacgaggaaacgttcgatgaggtggcaggggatgccgatacgcttgccggacttctgctggagctgaagggggaatttcctgctctccatgaaaaggtgacctacggccgttatgagtttgaggtgctggagatggacaaccgccgtatcctgaaagtgaagtttacagtaaatgcctcaactcctctaatccctaatccttaatccttgcctcatgcccctcttcttacaacataccgctcttccctgccgatggggaatttggaaaacggaggaatctccggaggaattgctggccatgcttcctcatcaggaagtataccgggaaggtatgcggcgtttcaccgcagcacaccgccgtctggagtggctggctgtccgtgtattgctttacacgctgtcgggagaagagaaagagattgcctatcatcccagtgggaaaccttatttggcagatgcttccgcctctctcagtatttcgcatacgaaaggttatgtggctgttgttttgggattgccgggtcgggaagtgggcattgacattgagcagtatggtgaacgggtaaggaaggtggcgcataaattcatgcgcgaagatgaacagccatccgtgtttcgcggaaccgacacttggtcactgttgctgcactggtcggccaaggagaccatgtttaaatgcctgaatgcttccgaggttgattttcgtgggcacatgcgcattctgccttttgctgtaaatgaaagcggcgtattctccgccgaagagtatcgtacggtggagaaacgccggttcactattcattattatttgtttccggattttgtcttgacattgagtctgtaaatttcttacagcctttccagttgtaccgtaaaatgtctcatcaacggagcttcccaagtgatgcgaactccgcgggtaatactttcccgcttgtcatatacattttttaaagcggctgctaccacatccatgtggttgtcggtgtacacgcggcgagggatggcaagccggagcaaatccaagccgttgaagcggttttcgcgggtcaccgggtcgcggtctgccagcagatagccgatttcacaaccgcgtatgcctgcttctagatagagttcggcggtcagtgtctgtgccggaaactcttctttgggcacgtgtgtcagcactttgggggcatccacaaatatggcatggccgcctgcgggacgttggtaaggtatcccgtactcatccagtttcatggctagatagcccacctggtgaatgcgggtttccagattgtcaaattcagtattttcatccaggccgatggcaagggcgttcatgtcacgtccgttcatgccgccgtaagtgaggtagccttcgaattgcacgcagaagcctttggcaccttcataccagtctttccggcgggtggctatgaatccgcccatgttgacaataccgtcttttttggcactcatcgtcatgccgtcggcaaggtcaaacatctcgcgggtaatttcctttatgctcttgttgcggtaaccttcttctctcattttgatgaagtaggcattttccgcaaagcgtgccgagtcaaagagaacgggcttgccgtacttgtcggcaatggcgcggacttcgcgcaggttctgcatggaaaccggctggccgcctgcggtgttgttggttatggtgacgatgacgaacggtatccgttcgctatgttcctgtaatgctttttccagttttttagggtctacattgcctttgaagggaatttccagctgtgtctgtttggcttcgtctatggtgcagtccagagccagtgcccggcgtccctcgatatgtcctttggtggtgtcgaaatgggagtttcccggcacaatgtcgccctcgtgcaccaggtaggagaagagtacattttcggcagcgcgtccctggtgggtggggataatgtatccaaatccggtgaggcgggtgatgacttccttcagtctgaagaatgaggtggctccggcatagctttcgtcgcccagcatcatgcctgcccattggcggtcgctcatggcgccggtgcccgagtcggtgatgaggtcgatataaacttgttccgatttgagttggaatacgttgtagtgggcttctttcagccattgttcgcgttcctggcgggtacttttacggataggttccaccatttttattttccatgcttcggcaaatggtaattccatagactctgtatctttaataatttgacaataggttaacggataaaccgattatttcggtttaatgtgccgaatttaggtaaaatctatgtaataatcaatttaaatatgactttttgtaatgtaaatgtccggacgaaatcacttcggccggacatcatcaaataaacttggcagagtttattaccttctttactttctctgaattaggtttgatgaatgaaatgatggacggtttgtccggctcattagactcaacgctttttcctcgaaagcaatgataaagtatgcatggcaggtcttctgacttgtttctgttgcaggcgccttcccggaagaatattccagtggcatagagtaattgtctgcaacgttgcacgaaacttacagcagcgggactgtccaggatttacacctgattcccttttaatcgctttcccagaagagggggagcgaaccaatgcatgacaaagatacggattctttttgagaaaacaattctatgagtgataaattttcttccccgctctctttctttttgccgacaaattggcaaggttttgccatcctcttggcaagactttgtcaccgcgttggcaaaactttgccataggcatggcaaaagtttgccaaaagcatggcaataggttggcaaaattactctctgattgatagtgacttaaggcgatttaagcaatccgtcatgtcggtaaggtgaaaagataccaatacaagccacacttgccacaagaaccttctccagaggtatgcaaagcattttgtttggtgtggtaaaacgggctgttatctctcttttgccagtgtgaatacaaactccagccctccgccttggttgtttttggcagagatggtgcctccgtgaataaggactgcattcttcactatggcgagccccaagccggtgccgcccaacttgcgcgagcgtcctttgtctacacggtagaagcgttcgaacaaacggttcagatgttcgggagaaacgccgatgccggtatcggcaaaactgaaatagtagtaattctcgtcttcgcggaaacaactgatgttgatgtgtatgttggtgccggcataagcgatggcgttgtccatgagattgcggaagatggagtagagtagagagtagttgccccgcaactgtatcttcgattttagggaattgacaacggtgatttgcttctgttccagttccagggacacttcgttgacgatgtttgaaaccagcatgctgatgtccaccttttccatatcgatcatgttggcggcttcgtccatgcgggtcagtacggatatgtcgcgcagcaggcggctcaggcggttgctttgcgcgtagcagcgttccatgaagatttgcatcttttcgggcgcgatgttctcgttgttcacgatggtttccagatagccttgtatgctgcttacgggggttttcagctcatgggcgatgttttgggtcaattgccgttttagctgtatctgctcctcttcctgggtgatgtcgttgatggaaatctcaaagctgaggtcttggaagatgatgcactccacgatgaagatgcgtccgttcttgttgatgtgaacggacattcttcgttcttcgttataggaagggcgtttctgtgccttgttgatgaaatctgttatcttctggaattcgcagatggagaatatttcttcggtagtctgcaggttggagtctgaaatcagattgccgtattgggtgaacagattgtttaccagtatctcctttttgtctctgttgaatacgcccagtccttcgcgggaggtctgcaaatgggtgatgagtttttcgcgctcaatgtaaagcgcctctttggtttcgcgcaggcgcttatatatttgtatgatgtgctgcgaaatctctccaagttcattgtgcgggaaggcggtttgtatgtccatgtctatgggttcgttcttgtcggctcttttggcaaactcacgcaggtggttgatggcactgccaagtttggaggtgaatttataaaagatgaatatcagcagcagtgatacaatgaccgtgaaccagatgtaatgtgggtcggcagccagattgttcatcaggttgacgttgtaggggagagctgagcggatgatgcagtctttgtagacggtggcagaatagaaataggttctgccggtggtttcggagatgcgccgcaggtcgtagcctttgccggctttcagtgccttctgcacttcggggcgcttgatgtggttgtccagttcatggctgccgttctgggaactgtcgaacaatacgttaccttgaaggtctaccacggtgacgcgcagttccttgtttacatgcttggagatatagctgtccagcatggaagtccataggctgtcggggagataacgaagttcctggtgtagtctgtcattatagtcttgcagctgcgtgtccagtagctccactttatattccttttcccgctgatactggtaggcgatgaagcatgcggcgaatatgaggaacagtgaaatgaccgaaaggaaaagcttccggctgaaggacagaaagtgtctgtcgttattcggcttcgaaacaatatccatatcccaagcgtgttacgatgcatttgccataaactccgattttcttgcgtaggcgtgtgatgtttacgtcgatggtacggtccagcacatatacttcatcactccagatgcggttcagtatatcctcgcgcgagaatacgcgtcctttattctgcaaaagcagcaataagatttcaaactcttttttggtgagcggtgcctcttcaccgtcaatgcagactttcttcttgatgacgttcagcaccagcgtcttgtagacaatctgttccggtgcatgctctgtctctccttgctgggtgcgtctcagtacggctttgacacgtgccgctacttcgcgcagcgagaagggtttggatatatagtcgtccgctcccaggttgaagccagtcacggtgtcattttccgtatctttggcggtaatgaagatgatgggtatctgggccgtcttcttgtccttcttcagcatacttgccattttgaagccggaaatttctcccatcatcacgtccagcagtagtaggttgtagctgccaatgtccattctcagagcttcttcggcagagttcgccgtgtccacttcgtagccttcgttttcgaggttgaacttcagaatttcacataagtcttcttcatcgtccactactaaaatccggtaattgttcattgctttgttgtttatgtatgacaggaataaaacaattttcttgtcacaaagttaaactttatttctttttatcggcaaaaatagtgcaaaccgaatgcagaattttcatgtttacatgaaaagttgtgccgagatgcaggccatttctgctttctgggtacaaaagtgaggctaatttgttacggaatgatgaaacaagtgttacatttgggttacattaaattcccgtttatctaaaagccccgtcacattaaaatattatctttgcttcgtaaatactgaattgtatgaaagaacttatgtatatcaggagtttctctaagagacatttgtcggttattatgggaactctacttttagtgataatcggctctgtctggctgaatacggctcctttccgctcgggatttgagattacggatgaactgggcggtaatatattcccttccagtatcctttcggtggctactaccgatgctcaggtcatagtgccggtagactccatgtatgtaggtaatccgaagtcctgcatcgctgtccgtgtccgttcgaggaatgcttatagccgggtgcgggtagaggttgcagagactccgttcttttcccgttccgtgtcggagtttgtgctggcaaaaccgcgtacggagtatattatctatcctgatatcatatggaattacgaggctctgaagaataacaaccaagcggaacccatcagtgtggccgttatggtagagatgaacggcaaggatttggggcagagggtgcgtactttttccgttcgcagcattaatgaatgtctgttggggtatgtcacgaatggtacaaagttccatgataccggcatcttttttgcagcttatgtgaatgaggagaatcctatgattgacaagctgttgcgtgaagcgctggatacgcgtatcgtcaaccggtttttgggttatcagggaggtgccgaagtggtggacaagcaggtttatgccttgtggaatgtgttgcaaaagcgcaagttccgttatagttcggtgtccaatacgagcctttccagcaacgtggttttttcacagcgtgtgcgcacgttcgatgatgctttggagtcctcgcaaatcaactgtgtggatgggagtgtcctttttgcttctttactccgtgccataaatatagaacctatattggtacgcactccaggacatatgtttgtaggatactacacagattctagtcataaagacatgaatttccttgaaacgaccatgattggtgatgtgaatttggatgatttctttccggacgaacagttggattcgacaatggtgggaaagtcgcagaaccagatgtcgcgcattacctttgataagtccaaggagtatgccaataagaagtatacccaaaataaagaaggtattcattccggtaaactgaactatatgtttctggaaatatccaaagaggtgaggaggagaatacaaccgatagggaaatgaggcgtagagtagaatacaaacagctgattctcacgaaccggctgttccaatcatcgtctatgaatgaagaccgttaagagtcttcgatgtgccttaagttcttcttcttcttcgatgtcccaccataccggtacagaggccatatgtcatcaaacattgccttgggatttgaagcttccagattcttagcgttgaaatttacctcatgctaacgatgggccatgcgacgccaccaatagtgctcgctcgtttttgatgcaccggggaacttttggattatgtctgtcacagtactggtaccttttaccagcacactggcaccgatgattggttcgcccgctgcatctaaaactttacctgtgattttcttggcttgctgagtactttgggaactaagttttatacttaatattactatctctcactagtaaattacctttcttgctaattataaattgttgaaaataagaatgataaatatgtacacaacctttttacatataacttgcacataataaagcttatgtcgaatggctattttccaaaacattgtttcaagctactctttcaaatgaatactgaccaacagcaactttcgctatttacaatttatatatattagcattatgctaaaaagaaaaatgttaatataacttacaagtaaaacttgctgctattaatagtctaacactattttttgatgaacttatgaatcattttactttttttgcttttgaaatctttgttcatgttggtatttccacataatcaagttttttttagtgaaaataattacacatatactttaatgtgtaaatcaaatatcttataatattagtatatattattaattcgtacactatattctttattttaatattgttaagttgtattatttgtaaatatagcatcaatatgatttaaagttaatacaattaataaatatcaaataaatacttaaaactttgcaaaactataaatgcaagcgttttaatattaatttaataatttttaatttgattgatagtagaattcctaaattaattcatatgtttgcaaataaatccaaataatagagcttatgaaaagaaattattgcttatcattagtgttgcttgcattgtttgggacagctatgccttttgcagccaacgcagctgttgaaagtgtacttagttcccaaagtactcagcaagccaagaaaatcacaggtaaagttttagatgcagcgggcgaaccaatcatcggtgccagcgtgctggtaaaaggttctggtaccggtgcggtgacggacgttgacggaaaattctctgtagaagcgccggcgggtagcacattggagatatcctttattggatataaaactgctatgcttaaagtgacaaatgcttcttcgtattcagtgactttgcaagatgattcgcaaacattggatgaagtggtagtgacagctatgggtattaagaaagaccggaaatctttgggatatgccattgatgatgtagatgcggaagagcttatgaaaaataaaagtgtgaatccgattaactctttggctggtaaaattgctggtgttaatattacgcaaggaggtggtgctgccggtgccggttctcaaatcattcttcgtggtgggacttcgcttgaacgtgacaatcaaccagtatttgttgttgatggtgtaatctatgataactctactacagtagttggtaactctgcttttgatggtagtttatcgacagcttctaccaattctaatcgtgtaatggatataaaccctgaggatattgaaaacatgtcagttcttaaaggtccggctgctgctgctctttacggttcacgtgctgctgcaggtgttgtaattattacaaccaaaaaaggaaaggagggagccgttgaggtgaatttctccactaagtatatcacgcaatgggctacttctcttcctaaaacacaacggaaatatggaagagggtttgctgaagatcagtacaccgatggaaaatatactggaacgacttataatgattttagttataattcatggggagcacctattgacaatgaggcagcaacctatgataatatagatgacttttttcaacaaggtggtgcatgggataccaatataagcgtggctggtggttctaaaaatagtaatttttatctttcaggctcttattataatcaagatggtataattcctaatactggttatgagaaagcaacgttccgttttaatggtgaacaaaagtggagaatgctcacattcggtgcaaatgtagcatattctcaagcaaacactgataaaacattgacctctgctgggttatatggttcaagtggttctggtaccatgacgggggtataccgttggtctcctactgatgatatgaaacactacttgaatgaagacggtactcgctatcgtatgtttggagatcgtcttgatgttgttgatgaacgcgataatccatactggattcttaataagaataagttgaaagataatactgagcgtttcacgggtaattttagtatcaaggctgatattgcagattggtggtggattagttatcgtatgggcattgactcttacactacagatgattcaaagactcttgctgctggtggagtatataaattggcatggcaaaaaggtatgtatagcgaaaattcttatcggtataaatatctttctacgaatttaatgatgaatttcaataaacagtttggagactttaactttaacttgatgcttggtacatctactgacgatactcggacttggactaactatagaatggcttggaactttgaaattcctgatttttacgcatttgacaatgcaacgaatgataaccgtgatttttcaagttcacgttctcaaaaacgccttattggtacatttggtgaattccgtgctgattggaagaatacagtgtttttgacagtatcaggacgtaacgattggtcttctacattgccaattgagaatcgttcttatttttatccttcggtaagtggcagtattgtgtttacagaatttcttcctaaaatagattggttatcattcggcaaagtacgtgcgagctgggcgcgtgtaggcaaagatacgagtccgtattcgttggaaacagcattgtggcccagtcagtcattccttggtggccttactggggtaagtaattattggactgctggtaatgctgcattaaaacccgagattacggaatctactgaattgggtattgaattgcgcttttttaataatcgtctgaagttggattacgcctactataccaataattcgtataatcagattatgtcacctcgtctgtcaaatgcaactggttatattctccgttctgttaatgcaggtgacgtttataataaaggcatggagttaagtattggcggtacacctattcaaactaaggattggacatgggaatcaactattaatgtcagtggtaatcgtggtacagtgaaaaatctgcttgaaggtgtagaaattctttatgtgactgatgtacaagttggtaatgctaaagcggcttctttccctaatggtaattttatggcaatttccggtagtgaatggaaacgtgatgaccaaggtcgagttgtattagacaagaatgggcttccgactaaaggaactaatgccaatcttgaaataggtaatcgtgaacctacattctctggtggatggaataatactattacttataaaggggtgtcattgaatatgttgtgggattttcgtgtaggtgggcatgtttataatggaacggaatatgctatgacgcttgcgggtgtgagtgagttctctgccaaccgggaaaaaatagaggtttcaggtgtaaatacaaatggtgaatttgtaacgaatactttcgaagctaataaaacatatacttataatggtaaagaaaccagcggtaaaacaattatagctaattattatcaggatatttatcctaatgaaacagcaaacttcatgacaaaggtgaatgcacttcgtcttcgtactatttcactctcatataatttgccaaaaacgttacttgccaaaacaaaagttataaaacgtgcctcaattacggcaacggctaataatcttcttcttttcactaattataacggtgatccggaagttgcagcagctggatcgggtgcagtaggctcatcctcagtaggtattgattattgtggagttcctgcgacagcaagttttgcttttggtgttaatctgactttctaaatattgtttaactgtatgaaaattgaataatatgaaactatacaagaaaataattctcggagttgcagcttgtgtcgcgctctccgcatgtgatgactggttggatgtcaacaccaatccaaatactcctatatctactgatgctgagttccatcagcgtttaccttggatgcaattttatatggaacatatttaccatattgtagcctcgaatactagtttttattgtggtcatttctatcgtaacaatgcacgcgaaggaggggcggctaaatggcaacttgattcttcaactcgtgctgctaatgcgcaacagtggttttttactcaggtaggtgtgaattgtaatgatttatataatcaggcaatggaggctggtgcttatcactatgcaggtgcagccaaattttttcgtgcttatggttttatgatgcttactgatttatttggagaaatcccttataatgatgcatttggagaaaatccttctcctgtttatgataatggtaaaacaatattccttggttgtataactgatattgatgaagctattgagttgttttctagacaacaagaggcaataaataatgttacaccagtggatttggtagaaggcgattcttggaatggtggtgatgcagataaatggctgaaaatgtgttatcttcttaaagcacgctggctgaatcatttagtcaagaaagaggctggaaattataaagatggcaaatatgatgctccggaaattctgaattgtttagctaaagctcaacaaagtaatgctgataatactgttataaaacatacggatactaatacaccttctcatgatgtattgggctggaatgagccgatagattattctgctctctattcttgtattggtatgaatagtaatatttatataactaaatgctattatgataatttgactaactttgatggaaagggaatagaagatccacgtgctgataagtttatcccttggactcgttctatgaaaggtcctgcaacccctattgatataaaatggtcagaggacggtttgtggcgtcgttctatgggggttgatatgcaaactgatattttaagtcaatcaggtccatatgctttgtcatttgatgtaactacccagagttggtattgtgatagcccaactcgtaaaggagatactatttatgtgtggacaacttgtggtggtacgggatacgcaggcggtgtagatatcctttatcgtcgtaataaatcttatgacacttctgcgctgagcggagtgttttatgcccgtccaacaagtccatcccttatggcatcgtattccgaagcttgttttatcaaagcagagacgcttttccgtcaaggcgataaatcgggagcatttattgcctataaagaaggtgttaaagcaagtattgattttgttaatgatcagattggcgtgtggacttcagaggatggaaaattggagtcttgcccctcgtttactcatattgaacaaactgatattgataatttcttgaataatgcactaggaaattcttcagatattactctcggtaaaattttgactcagaagatgttggcaatgccatattctaatgagaattggaatgatatgcgtcgttgtgattatgatacgaatatattcatgaattgggataaatcgtattattataggaatactccagcaggatttacttactgcccggaagataagtcgcctcgtcgttggaagcaagcttcttatgagctgacatataataccactaatctagcagccattggtgcccaagttccaggagctgctgagcttggtgaaggatggtataataataatcttatttgtacattgcctgtgtggtgggattcaaatcaggaataaaaagaaagttcaattacggttggcattatcgggatggcaaacctattcagccatctatttatagaatgttaatttaatattcttaaaatcttaggattgtatgtattccattgattatctttgcatccgaattagaaatttaatggatttcattttgactttagtttaattgaataaagatattgaaggctctaatggtcttcattcatagatgatgattggaacagccggttcgtgagaatcggctgttttttgtttcgtttgtttgcatatcaacggcggtaatgttacttttgctctaaaagcgaagataggctgcacctcagcataaaaaatgaacaagttcattttattttgcattcggtttacactatctttgcgaaaaatagctaagatggtatgaactgtctttgcaaagattagtctatatatggaacaaagcaagaaatttatctctccgggagcatggttttccatgacttacccggcagactggaatgaattcgaagatggggaaggttctttccttttctataatcccaatgagtggaccggtaattttcgcatttcggctttcaaagggaatgctacatatggcaaggactccgtgaagcaagagttgcgggaaaactccgctgccactccggtcaggataggccggatggaatgtgcatatagtaaggagatgttcgaggaagaaggtgcgtactatacttctcatttatggataacgggtgcggatgaagttgcctttgaatgttcgtttacggtgaagaagggagagtcggttgcagaagcggagaagattatcgcttcgctggaaacgcgtaaggatgggatgaagtatccggcggagataattccggtgcggctttcggaaatctatcagattaacgaagcatacgagtgggtggatactactgtaaaggagttactgaagaagaattttcaaggagcggaggaagacattgccaagatgcagcagatgatggaagaaagcaacatcagccctaaaaagaaagatgcgtggctggcttttggcattgtgctttgtgttattttcgccaatgaagtggatggtatggaatggcgtaccttggtggatggaaaccgggaagcgcccatattgctgaatacgtctaccggtgaatggatagaccccatgaagctggtttggagcaaagtaaaggcaggaggtaaagtgaatctgccggaggtatacagctccttgttctaaggtccggtcatcttggtactgtgagtttcaactttcaattttcatttatcaactattaaagcattggcagcagtaaattcaattcttcaggtggaaaacctgaccaagtcgttcggtgacttggtactattcgaaaatatctctttgggcttgtccgagggacagcgtgtcggactgatagccaagaacggcagtggcaagacaacgttgctcaatatcctttctggcaaggaagggtatgacagtggcaccatttccttccgtcgtgacttgcgtgtgggttatctggaacaagacccgcagtacccagaagagctgaccgtgctcgaagcgtgctttcatcatggcaacagtactgtcgagttaatcaaggagtatgaacgttgcatggagacggaggggcatcccggtttggacgaaattctggtgcgtatggaccatgaaaaggcttgggagtacgaacagaaggcaaagcagattctatcccaactcaagatacgtgatttcagtcagcacgtaaaatacctgtccggtgggcagttgaagcgtgtggcacttgccaatactcttatcactgaacccgatttgttgatattggacgagcctaccaaccacctcgacctcgatatgacggagtggttggaggaatatctccgccggaacaacctcagcttgctgatggtgacgcatgaccgttatttcctcgaccgtgtatgttccgaaatcgtagagatagacaaccggcagatttatcagtataaaggcaattacagctattatctggagaagcgccaagagcgtatcgaggcaaagactgtggagatagagcgtgccaacaacctctaccgcacagagttggaatggatgcgccgcatgccgcaagcccgcggacacaaggcgcgttatcgggaggatgccttttacgagttggagaaggtggctaagcagcgtttcaacaacgacaacgtcaaactggatgtcaaggcttcttacataggcagcaagatattcgaagcagaccatctgtacaaatcctttggtgacttgaagattctggatgatttctcctacatcttctcccgttacgaaaaaatgggtatcgttgggaacaatggtacgggcaagtcgaccttcatcaagatactgatggggttggagcaggcagacagcggcacgctggatattggcgagacagtccgtttcggttactactcgcaggacggcttgcagtttgacgaacagatgaaagtgattgatgtagtgcaggacattgccgaagtcatagaactgggtaacggcaagaagctgacggcatcgcaattcttgcaacatttcctatttactcccgagacacagcacagctatgtctacaagttgagtgggggagaacgccgccgcctctatctgtgtacggtcctgatgcgcaatcccaactttctggtgctggatgagccgaccaatgaccttgatattgtgacactgaatgtgctggaggagtatttgcagaacttcaaagggtgtgtgatggtggtgagccacgaccgctatttcatggataaagtggtagaccatctgttggtgttcaacggacaaggagacatccgggacttccctggcaactatacacaataccgcgactggaaagatgcgaaagctcatcaggagaaggagaaagagaaggaagttaccaaggctcaggaggataagacggcgaaggtgcgtctgaacgataagcgtcgtatgtctttcaaggaaaagcgcgagtttgagcaattggaacaggagatagccgatctggaaactgaaaagaaagtgattgaagaagctctgtgcagcggcaccttgtctgtggacgaactgacggagaagtcgaagcgtttgccggaactgtcggacttgattgacgaaaagacattgcgctggctggagttgagcgagatagaatcgaactgaagtccggaattaaaaattaagaattgaaattatagaattaggaaagtgggaaatctgacgaactatcatagccatagccttttttgtgacggacgtgccggcatggaggactttgtgcgttttgcattgagtgaaggttttacatcttatggcttttcatcgcatgctccattgcctttttctacggcatggactatggagtgggacaggatggacgattatctgtctgaattccaccgtctgaaggagaagtatgccggacgtatcgaactgtatatcggtctggagattgattatctgaatgaagcgagcaatccgtccatcgcccgtttcagggagttgccgttggactaccgtatcggttctgtacatcttctctacaatgacaaaggggaagtggtggatgtagatgtatctgcggatacctttaagaccattgtagacggacatttttgcggtgatttggagcatgtggtccgtctctattacggccggttgacgaggatgctcgagctgggaggtttcgatattgtgggccatgccgataagatgcactacaatgcagcatgctatcgcccgggattgctggacgagccttggtatgatgagctggttagggcgtatttcgcagatattgcccgtcgcggctatcaggtagaggtcaataccaaagcctatcatgacttgggcactttctatcccaatgagcggtatttctcctacctgcatgatttgggtgtacgtgtgcaggtaaacagtgattcacactatccggaacggataagcaacggacgtcccgaagctttgcgtgccttgaggaaagctggatatgaatcggtgatggaactacacggaggagaatggaaagagatgcctatcgtgttttgagtgaataggatacaaaaactcctgacttgcctttttgtaaaggtagtcaggagtttttctttctattatgaactattctgttttcagtaaaaagtcatcaatcgcctttttgtaggtagccttatcggctgctccgcggaagagctgaggctctccattcatagggatgaatacaaaaagggggatgcttgttgcattgaacaacgctgccaattctttttctttatccacattgactttgtagacaacgattttatcggcatactctttggccagttccttcataatgggagccaccatgcggcaaggtccgcaccagtcggcatataagtctatgatggcaggcttgcttcccttgtatttccagtcctgggatttctcatagtcgaacacattcttgataaacatggctttgttcatgacgacaacctctccgcttgtttgagcgtaggccagcatgctggaaaacacaaggacaactattgttataatcttcttcatttcttcttgttaagagttttgttctataacggctttcaaatccttaccgctgatgacacccgagtggcgccatacggcttcgcctttcttaaatacgataaatgtcggtactgcttgtatacggtagcgggcagcaagttcttcgtgctggtctacatctattttggcgatacgggcagcatctcctatttcgtttttgagttcttccagtaccggatgcatggccttgcacgggccacaccaggttgcaaagaaatcaactaaaatgggcttttctgattgtatcaattcttcaaacttttccataattttttcctttctgtttttatttatttgtaatgataacaaaataggaggaggatttgttcgctaaatcattatttaatcgtcatctcttcaatgagatgcgaagctcccgcgtatttgtcgatgatgaacaaggtgtagcggatgtctacacatgctgctcgttgggaggacggacggaaggcaatgtcgccagtcagaccttcgtaattgcggtcaaagccggtacctatcagttctcctttggcattgaacacggggctgccggagtttccaccggtattgtctgtgttgacaatgaagcagatgggcatttcgccgttcggcatggcataacgtccgaaatcctttgcctggtacagctgtttcagtttggcggggactacaaactcccaattgtcggggtcttccttctccatggctcctttcagagtggtgtagtaatcatatttcacaccgtctgccggagcgtaggggagtacttgaccgtaggtcaggcgcaaggtggagttggcatccggatagatgggctgaccattggcaagtttcatgtccatcatgccctttacccataccttgtgggcggcattgtagtttttattggcatccatcatggcaatggaggtctgaagcaggccgtccgtgatggaatatttcagcaagaccatccagtctgtattaatcttgtagaggctgggcttgcggatgaacttggcaaagttctccttgttgccgaagatggaatgttcgaagcaggcgtcgatgaaagcgtcgctgttgcccttgaaacgcttgtctatgatttggaaaataccgatgcgttgttcggcagggatatacttcatgtaggtttttagcatttccttgccaacgatacgttccacttcggggaaggggacagaggcgaagtagcggtcggctgccttctgaaggctgtctttagctgctgcaatctgtttcttgtccttgttcttcaaggcagacaccagtcttgcggtactggggatacgcatgaaatcgagtcccgtcaccagtgcttcctgaatggcttgctggtggtagagggctggacggcgttgctttacgatggcgcgtatctggtcgaatgcctgctgatagctattgtcgttcagcgagcgtccgcgtgccaggagtgcctcttgctgtgcacgtttggtgtccaatactttcagacggacgaggccttcgttcataccgatggcatttttccagtagttggcagaagatgcatacttgctggcatagtggatgcgtacggcatcgtcttgcagcatctgcttcatcagagctttctggcgtacgtcacgcacgtggtggcgcatgaagttggtggtttgcatgcgttcctctacttcgtcggaaatcatgtagcgccagttgcgtccggggaagcccatgacgaaggtaaagtcgccctcgcgatagccgtcgaggctgatggtgaggtgtttcttcactttcagggggacgttgtctttgctgtaagcggcgggtttcccgtctttgtcggcatagatgcggaagatggagaaatctcccgtgtggcggggccacatccagttgtcggtgtctgcaccgaacttgccgatggaggaggggggagcgcctaccatgcggatgtcgctataagtggtttttacgaatagatagtatctgttgccaccgtagaaggctttcagttccagtttgcggccgggtgtcagggtgatgccttcggacttggcgaagcggtcggctactgttttcaggtatttgggagacagataattggtgccgttcgggtcgtcgtcggttttcagttgttcgtttacgtagtctgtcacgtccagtatccggtcgacgtaggtgacggtgagtcccttgcagggaagctcctcttcgcgggacatggcccagaaaccgtcggtcaggtagtcatgttccaccgagctatgttgctgtatggcgctatagccgcagtggtggttggtcagtaccaggccttcggcagagatgacttcgccggtacagccgccgccaaaatgtaccacggcatccttcagggcaatgccgtcgggattgtagatttggttggcggggatgagcaggccgagttccgtcatggctacttcgttctgcttttgtaggtcggtgagcatccacataccttcgtcggcgtgtgcggcaaggacagaagatgtaatgaataatgataataggattcttttcatggtgatgtgcgttagaagagcatctgagaggggggctattcagtatacgactgaatagggttaagtatgcgactgaatggcattcagtcgtatagtgaatgccattcagtatgggaggtaatctctcagaggattttatttattctacgatgtgcatttcgtttatcaaatgtccgcagttgcccagcttgtcgaggatgaagagcacgtagcggatgtccagtgcaatgcaacgctgcaggtcattgttgaagttgatgtcaccgctcagagactcccagttgccgtcgaaagcagtaccgatgagctgtccttcgccattgatgacggggctgccggagttgccgccggtgatgtcgttcgtcgtgaggaagcaaaccggcatggtgccgtctgccatggcgtagcgtccgaagtctttcttctgaatcagttctttcagcttggcgggtactacgaattcacggtcttcgggattctctttttcaaggataccgtcggtagtggtatagtagtcgtagtgtacagcatcgcgcgggctgtatgattttacattaccataggtcagacgcatggtgaagttggcatccggataggaggggacgggctgtttcatttcacccaagccacggatgtaggccttgtggagcagttccattccgctttccagttccatgtattgctttccgagttcctgcagcttttcgttcttggagcgcgagtaagccgtagcagggtctttctcaatggctttcacggtgggctttgccaggaatttatccaggttcttgcggttggagaggatggagttgtcgtaaatgttgtctacgtatgcgtcgtagtcgcccttgaactctccgttgatggtttggtagaaggagggcagctcgttggcgttcagtgccttggcaagggcgggcaggatggctttggctacggcgcggtccacttcgtggtcgtagtctttattgtggatgccatcgtaggcattttccaactgcttcttcgaagcttgcagcaatgagtcgttcttctcttcgagcgctttctttatgttatccataataaggtaggtactgccgaattcgatagcaccgcgcaatgcttcgttggtatagtagagctggcgcagcgtgggggtgcttttctcgatgatggcatcaattttctctaccacaccctcgtattcgggttttccttgggcaaaggcggcatactttttctcgatttcggctttggcgctcaacacgtcattgtcgatgattgccttgttcataccaatggagtttttccagtagttactgcttccggcaaacttgctggcatactggatgcgggtcttgtcactggcatccatatacttgcgcagcacttcgaggcgtacgccgcgcatgtcaatcattgcctggttcacggcgttcatgcgttgcttcacttcgctctgggtgaggtaacgttctgtgctgccgggaaagcccataatcatggcgtagtcaccctcgttcaggcctttgatggagatgggcaagaacttcggcgttttcaggggtacattgctttcactgtattctgcaggctctccgttggcatcggcatagatgcggaacatggagaagtcgcccgtgtggcgcggccacatccagttgtcggtttcaccgccaaacttacctaccgaggagggaggagcggcaaccatacgcacgtcgctgtataccttataatagaacatatagaatttgtttcctgcatagaaggggagtgcgcgcacttcaatgcccggtttacccttcaaatcgctcttttccagttcttcctttgccagtttgctgaggaacggggaagtcagtgcatcgatttccgtcacttcgcctgcctttattttagcgttgacaaggtcggtgatgtctacaatgcggtgcacgaaacggaatttcaatcccggggtgggcagttcttcactacggttcatggcccagaaaccatctgtcagataatcgtgttccacgctgctgtgctgctgtatggcaccgtatccgcaatggtgattggtcagaatcagtccttccggagagatgatttcgccggtacagccgccgccaaagatacctacggcatctttcagtgatacgccgttgggattgtagaggtcgtcagcctccagcttcagtccttgtttcttcatcatgtcgatggagttctgctgtttcatcagttgcagtaaccacattccttcgtctgcacgcgcagagcagattgtcagtgcggcaatggccgcaagcaaacctttcttaaatgtaatcttcatataatcaattattaagtaatgtctttgaatttcattgttatcgcttgtgggcttatggcttgatggcattgtttcttattgcttccataatgtttgcaggcggacgctggttcatcagttcgttcttcataaagtccatgtatggggctgcgtgactgaagaacttatgatatcctgcacaaaggtaattcagtcccggctccccgtcggctgtacatacaaaacggttctttgggcattcgccgttgcaggcaaacagccattcacactccctgcattgggtggggagcgattgttgcttcatcagtccgaaggcttgttgccgttcgccgtacatcatctccaccagtgtattctgatggatgttgcccagtttatattcggggaaaacaaaatggtcgcaggtatatacgtctccgttgaactccataacacctgcatggccgcacgtctttgccatggaacatacacccggctgttcgcctatccagttggcaagggtagagtcgaacagctgtatgtagtaagtccccacgtcctgctttacccattcgtcgaacaaggcgcataggaagtctccccattgttccggcgtgacggagaagtctgccagctgcgtgctcttttctttgtctgccagggaggcaagatggcgtccgtccccatgaggggcaatgcgctccacgatgggggcaaactggatgtaatggcatcctatctccttgaaaaaattatagaagtccagcggatagtcggcgttgtagtcattgaccactgccattccgttccattccacaccgtgctttttcagcaggttgatgccctgcatcaccttgacaaaagagggcttgccctgcttgttcttccggtattcgtcatggaactcttgcggtccgtctatggagacgcccaccaaccagttgttttctttgaaaaaccggcaccattcatcggtgagcaacgtgccgttggtctgtatgcagttgtcgatggtgcgtccgttggcatatttcctttgcagctccatggcccgtttgtagaaagacagcggacgcatcagtgtctctccgccatgccaggtgaacagaacctggggcatggtctgtgagttgatgtactcctcgataaacttttccagaagttcatcactcattacatgcttggggttgtctctatatagtttggatttctccagataatagcaataatcgcatgccagattgcataccgcacctaccggtttcagcattacatagagcggtttggcaaaaggtgcataggttgacatgtatattttctctatttttatcatttataattgtgcaaaaatacgtaaaccgaatgaaaaatcctttctttctatccggtttataaggaatattaatacctttgctgggtgtaattcaaaaatcgtttcttgcatgattagaatgagtgtgaaccgcattttaccctttttgctcctgcttgtgctctttacttcttgcaaccgcaagtataagatagagggcagttcttcggtaaccagccttgacggaaagatgttgtttctcaagacgcttcggaacgggcaatgggtgaatgttgactcggcagaggttatccatgggcatttcaagatgaaaggccggaccgattccgtgatgatggtgactctttatatggatcaagagggtattatgcctttggtgctggaagatggtaaaatcgtagtttccatctccaatacccagttgattgccaaaggaacctctttgaatgacaagttgtacgagtttatagacaaacgcaattccctagaggtaaagatagaggagctggaacgcaaagaggcgcgtatggtgctggacggtgccaatctggatgatgtgcatggacagttggcaaaggaaggcgaaacacttgtgaaggagatgaacgactacgtccgtcagttcattgtagataactttgagaacgtgctgggtcccagtgtattcatgatgatgtgcagcacactgccctatccggtgatgactccgcagattgaggacatcatgagaactgctcccttgtcttttaaagagaatactttggtgaaagatttccttacaaaggcgaaggagaacatgcagctgattgaagagcagaagcgcatgaagcaaaatgcttctgtaggaggacagaaataaataggaatgagttgataatgataaacgggaatgcctgaatatcttgataggatattcaggcattcccgtttatcattatgtttttatctgtcttggtcttcgttcttcaccatccctttatacttttccggcaatgcactctccactgccgcataagcctcgttcatacttgctttgatgttttctgcccctttccctttgggaggaataggttcatggatggtcagtatcatccggtggcggtgtatccactttccggtgcgtggaagaatctcgaacgagccgtctatcgtgacgggtactacttccagttgcagttcatccgccagctggaaagcacctctcttgaagtagcccatgtgtcccgtgaaggtacgtgctccttcgggaaatactaccagtgatacgccgtctttcaaagatgattctgcctgccgcatggtggcaagcaccttcttgggactggaacggtcgacgaagatatgtcctgcgctttcgcatgccttaccgacaaacgggattttgcgcaggctcttcttcatcatccatttgaagttccgtcccaggaatccgtatatcaggaatatgtcgaaggcgccttggtgattgggcacaaacacgtaagaagtacgtttgtgtattttctcccttccatgcacctccaccggaataagcagtatatagcagatgagctgtgaccagattttaccgggatagtacccccaggtatgcgccccccctatcagcgaaccgataatggtgaccaatgctgtaaggatagtcagtaccaataaaataggcaacgcaaagcaaacctgataagtgatataaagtatcttcataggtgtcggattttttattgctacaaagatatacctttttcttatttcgtcactctttctctcttactaattttagtactgtaatttccggccatgccccgaaccggaacggcagtcccacatagccgatgccaatatttacgtacaaagcccttttgccttcgtagtacattcctctccattccggatagataagttcggcaagggagtgtccgaacaagatgccttgcatggcgtgggtatgtcctgcaagcatcagtgaaatatccgattggggcagtacctcgcgcctccagtgggtagggttatggctgagcaatatttggaacatcccttccgtaccctgcatggcttgcggtaagtctgcaaattgggagaaaggaggctcgccatcgttttccacaccgatgagggctatgctgtcacctttgtgataaaggatgtcatgctcattgttcagcagtttccatcccattgctttctgctgccggattaaatagtccagattggcgatttctgctttcgggctttgccagtgatagtatgagccatagtcatggttaccgaggatggagtatactccgtccggtgcgtacagttgggagagtatttcttggaaaccatccagttcatggctctgctggttcacgaggtcaccggtgaagacaatcaggtccggcttctgtccgttgactgaatcgaccaattgtttgatgggttccggattgccctgccaactgccgatgtgtatgtccgatatctgcacgatgcggtagccgtcgaaaccttccggaatattggcagaacgatattctacttctttcgtatcgaaacgggtgatgcctgcaaaagttccgtagaggatattgaagaagctgacgacagctaaaaccagtcctatagcggtgaacgggctgcggggacaacgacggatgatgaagtgcgccagtactcccaccagagagcaaagcatgaatatggtttttggaaagacaaacagcatgatggtaattgccagtctgcctatagcctgcgtatggtttgacatcgcattgtcgcccgtaaggaacatgaagtaaacatagcctgccgccagcaataaggtgggaagccaatagaggctgcgtagaaatgtctttctggtttttcttactacataaaccaagtaaatgtaaaggtcggggatgagaaggaaaaggatgaaaacaagagttactcggtgcatatatctttcaattcttcaatgttctttttaatattgtccagatgtttataaatcacttttttgtagagaatatagataatcaacgcatcaaatactacaaagagggtaatcagtatggcttgcacgccaacggacatcagatgatattccatcacccaataattgaggatattgaaaaggataatccagatggagatgcccatcacctcatatttggtccattggcggaaagtggtcatacggcggctgacttcggcaacactcatttcttcaatatgtgtattcttattccaacggtatgttttccagtcccaccacatgcctgcgagaatgctgatggcaatgaaccctaaaaagggaacaatcttttcttgtagttgttcgttgaaaccgaaggtgggcagtagcagccatataagaagaagggtagccagacatatcgttcctattccgatagagaagcgttgtatgactacgaggcgtcccagacttttgcgggtatttgccttgtagccggcaatcagttctgtaatctgctgttcatcagcaatcggttctttctgcaactgttcattcagtgcgttccatgatttcttcagttcatccagttccatatatctattcctccttattcattcttttcaatttgtctttgatgcggctgagcttggtggcaacgtttgtcaaagtcagcccggtgatttcggcaatttcttcgtagcttttctcttccagatagagcaggatgatggatttttccaattgtcccagccggtttatcatccggtagagttgccgtagcatggcttgtgtctcgtcggtttcttcagtccggtcggcttcttggttgagggtaacgatttcggggatgttcttttctttgcggataaagctgatgcacgtgttcagtgcgatgcggtaaatccatgttgaaatcttgcactcccgccggaacttgggaaatgctttccataagttgagtaccacttcctgatataagtcgttgagggtagcgttgggcgtggtgtacagatagcacaccttatatatcacgcgctcatactctcgtaccacggatacaaactcttgttctgcattttccatctttttgcttctttcgagttgctttgcactgttagtcgcggaaaggggcgataaatcacagttcaaaaggattattttttatggcacataggtgacacagattaaacagatgaccacagatgagaaattcatgatgaacaaaattatcagtgaaaatctgtttaatctgtgtcgtctgtgtaactccttttttaatgtaccgaattatcagcattatgatacgctttctatatttcctgccagaaacttccgcatattccctattggcattccccggcggcgggcgtagtcttccagctggtcctctccaatcttgcccactgcaaagtatcgggatgcgggatgtgccagcatcatgccgcagacggaggagtgagggtgcatggctccatgttcagtcagcgtgatgcctatctgtttcatgccgagcagttcgtccagcaagaaattcacggattggtcgggtagggaggggtatcccacagcggggcggatgccttggtacttctcgaccagcaaatccggaatggacaaggattcgtcgggggcatagccccaagcctccttgcggacatattcgtgcatcttttctgtggcggcttcggcgaggcggtcgttcaaggtttgtacaaggagatgtttgtaagggtcgttcttgtaagtctcttcggcctcttcactgatggtagaggcgaaaagccctacgatgtcgggtgtgtccgaagagaggggacgtacaaaatcactcagacagagaaatggaccgccatcgggttgtggtgtctgctgtcggagcagagggaaggttgttccttctatcaagaggttatctccatctgcatttgcctggcaaagcctgaagatgcaatggatggagattgtttcgtccagtcggtcgagcattctattggcttccttgaagagctgcatggcttcggaagctttggtacgttcctcctcgggaaaggtcgtcagccaaagtgcacggcaggaatcgcagccatggatgttggcaatagccgcaaagcgaggctggaagccccaggcatggaagaaataaatccagttgatgtaaggggttacttcatgaatccgatacgaaagcaattcatgccccggtgccagtattgtccttttcatcccatttaatccctaatccttaattcctagccttcactccccaaatctcagttcctcgccacgataagcgtcgtccaccataccgtcagtataaacgggatgtccgttggcaaaagtcctttccactttccagttgaaggtatgtccttccaatgggctccagccgcatttgctcaaaactttgtcggctgtcacttcccacggggtatcggggcgtaccagcacaaggtctgcccggtaaccttcacggatatagccgcgctcgttgatgtggtagatttgtgcgggagcatggcacattttttcaacgatggtctcgagagtgaatattccctcatctaccagttgcagcatgctgacaagcgaaaactgtatcatcggcatgccggacatggctttcaaagcacccccttctttctcggcgagcagatggggggcatggtcggtggctattacgtctatcaggccggagttgacggctgcacgcagggcatcgcggtcggcttgcttcttaatggcaggattacacttgatacgtgtacccaacgtgcgatagtcactgagcgtgaagaggagatgggcaacgcatgcttcggcggtgatatgcttctcggaaagtgaatagtcattgaataattgcagttccttagctgtggacacatgcaggatatgcaaccgtgctccggcaattcttgccagccgtactgccagttcagaggatgcatagcatgctgccgaagagcggatgtagggatgcttgcctatgggaatatcattctctccggcaaacatttccttatacttggcaatattgttcttgatggtttcctggtcttcgcagtgggcggcaatcagcatgtctgtaccattgaaaatatttagcaggctgttcatcttgtctaccagcatgtttccggtactggaacccatgaatagcttgataccgcagacacggtgcttgtccagcttgccgaattcgctgtagttgttgtttgttgcaccgaagtagcaggaatggtttacgatacacttttcgttcagtaaatcgagcttggcgttcaaagcatccagtgtagtggtcactggatttgtattgggcatatccatgatggaggtcacaccacctgcggcagccgcacggctttcggtgaggatgtccgctttgtgggttagcccgggatcgcgaaaatgtacatggtcatcgatgatgcccggcaacagatagcatccggtggcatctatggtttcatcacaaggggcagagagaggtttccagttggtcagtacctctgcaatgcgcccgtcttctatcactacggaacctttcacggattgtccttcgttgacaatcgtagcgttatgtatcaatgttcttttcatatcttcctaatatttatagtaaacccctatcactctatcacccatcacttcatctccttatctacagtaggatatttatgaaaccaactgttccatttcaaccgaatcactccgaatacggcttcaccaaaaatactgctgttcattttggaagtgcccagttcgcgattgatgaagatgacaggcacttcctttaccttgaagccgcatttgtaggcggtgaatttcatttctatctggaaggcgtatcctttgaagcggataccgtccagattgatagtctccaatacccggcggcggtaacatacaaatccggctgtagtatcgtggatgggcagccccgtgatgaagcgtacatatttggaggcaaaataagacatcagtacacgtcccatgggccagttcactacgttcacaccactcacataacgtgaaccgatggctacatcggcaccctcttcggagcaggcccggtagagacggggcaggtcttggggattgtggctgaagtcggcatccatttcgaatacatactcatagtctcgttgcaatgcccacttaaagccggctatataggctgttcccaatcccagctttcctttgcgctccaccatgaagaggcgttttgggaactctttctgtaaggttctgacgagatctgccgttccgtcgggcgaaccgtcttcaatgacaaggatgtgaaaaccatgttccagagcaaaaacggcacggatgatattttctatattctcccgttcgttgtaggtggggatgatgacaatgctgtctgatatttgcatacttataggtaatgggggttataactgggaacaaatgtaatacatttgttcgaaagtgaaaagttttattccagtatattctcagagggctatgaattagtccgcttcgtcactttgtgcttttatcagtaaccaactactgacttgctttttcaatatttttgcatatgatagttgtgttcttggtatgctctttgtcaatcccattatgctggcaatggccgtcttaaatttcgaacattctgctccgtgccagcatgcaggccccaactactccagccttgtcttttagcttggaaacagtcaccgtggcgtctttgttgaccagattcaatgagtatttccttattgccgttttgattggctgcactatatagtctcctgttgatgataatgtacccccgattattactagttccggattgaatatgcttattaatccagctatttgccttcccagtttttggcctatttcttccactatctcaatgcatagcaagtcctctttattgactgcggtgatgatttcatccaaggtgggcggattttctgcagtccgttttgatagtatggaactttctccgctaccgattctttccaacaggatgcggtgcagtgccgatcctgaggcttccgtttctaggcatccttttttgccgcagtggcacagtatttcattgtcgaaaacattgacgtgcccgaattctccggaaaatccagattttcccgtgtataccttcccgtctatgatgatgccgattccgagtccccagcttatgttgacaaaaatgatgtctttttcccctttgacgcatccttgcatatgctctccataggtcatggcccttgtgtcgttgtctatgcagaccgggtaccctattttttcattcaatacatccgccaaaggacgctctgaaaagttgaacatgctgaaactatatcctgattccggatttacccttccggagatgttgatgcagatgttcattatcttcttgtcgttgatttctgttccctttatgaagtttcggatgagtgcacacagttcttccaaagcttcctgtgtattttcgaacttgtatggtatgttcatcctgatttccaccatatcccccttgaaattgatcagtccgatgtttatggcaaatttcttaatgtccactccgatgaagtatcctgattccggattgagtccatataggcttggatggcggccgctactggtctccagtttcccatagtcgtttatatagttgtcctcacacatttcattgatgaatttggtggttgtgggcacactcagatcgagttccttggccaagtcggtaatagtggagctcccattatatatataatgtgtgatgatccttttttttaagagtgcattcttgctcccggtttccatttcttttaataaattctgtttcataggtatgtatttttatgttatttgctctattttgtttattatattaatatatacgggtttgttattcggaaatattatgtatttaatttgttattatgtaaattatttggtaattgcgtgttaacgtatattaattgtaggttatatattaattaaatactttattaactcttgcaaagataataaatatatctatatttgcagcgtagtaattgaataataacgattaatatctaaacaatgaaaaacataattgattttttatcttaaaaaatctgttcgataggtttaatatataatggttgatcttaattttattaataatgaaaacacgcagggattttttaaagaggactgctttgttcggtgcgtctgcattcatggccccttcattgttggggcgggagagtgatggggattacttcttttctcaagagtctgcctcttccatgctggtccccatgggcgatgcgcttaaaattaccggcacgttcttggatgagatatcccatgatattccccatcagaattggggggaaagggaatgggatcaggatttccggtatatgcagagtattggaattgacacggtcataatgatccggtcgggttatcgcaaattcattacttatccttcggcgcatttgctgggtaaagggtgttatatgccttctgtcgatttgttggacatgttccttcgtctggcggggaaatatcacatgaagttctattttggtttatatgattcgggcaagtactgggataccggtgacctttcgtgggaggttgaggataacaagtatgtgattgatgaggtgtggagcaggtacggtgagaagtacaagagtttcggcggatggtatatcagtggtgagataagccgtaagacgaagggtgtcattgatgcctttcatgcgatgggcaaacaatgcaaggatgtctccggcggtttgccgacttttatttctccgtggattgacgggaaaaaggccgtgatgggtacagataagttgacaaaggaggatgcggtttctgttcaggagcatgaaagggagtggaatgaaattttcgatggcattcatgatgtggttgatgcctgtgcttttcaggacggacatatcgattacgatgaactggatgctttctttacggtgaacaaaaaactggctgataagtatggcatgaaatgttggacaaacgctgaaacctttgatcgtgacatgcccattgactttttacctatcaagtttgacaagttacggatgaagttggaggctgccaagcgagccggttatgacaaggccatcacttttgagttttctcattttatgagtcctcaatcagcatatttacaggcaggacacttgtataatagatataaagatttttttaatctaaagtaatatggagatcatgacaagactgttatttgtattttttatttctgttgttcacttgaatatgatggcacagaatccacttgctataaccggacaagtgaaatgtcaggggtatggggtcgcgaatgtggtagtaacgaacggtttcgattgtgtcttgaccgatgcttccggcaagtataccattccttaccatcgtgacgcccgttttgtatatgtcactactcctacaggctatttgcctcaacgggacggtagccttcctttattctatcagcatattatagaagggacctttatatatgatttttctttggtcaagaatcaaaggaatgatgatagacatcttttcttggttcaggctgatgtccagctgggaaaaggcgaggatgttgcggcttatgcggagtacctgaaggatatgagggagtttataaacagacattcagaatatgatttgtttgtgttggactgtggtgatattgtaggcaatgccttgtcgctttttccttcatataaacagacatcggacgtgttggatgtccccatgtaccgtgtgattggaaatcatgatatggaatatggggtccgttcctacgaacattcgtataagacctatgaagagtgtttcggtcctatctattattcctttaatcgtggaaaagcccattatatcgtgcttgataactgttactatatcaataggaattatcgctatataggttatattgatgagcgtactttgcaatggattgagaaggatttggcttttgttccgaaagaccatttggtgtttgtttccatgcatatcccctccagttctaccaaggagttggaatttaatgctctgcttcctgatgaaaccagcaatgcttcaagtttgtatgatcttttgaaaggatacgaggcgcatttgcttactggccatacccataacaacggtaatgttgtattcaatgacagtctgatggagcataatactgcggctgtatgtggtactttttggaaagctgatatctgtaccgatggcactcccagcggttatggtgtatatgaagttgacggaaacaagctgacttggcgttataagagtgcggggtatcctatcgaacatcagttcagggcttatccggtgggggcttcaagggattatcctgagtatattcttgcgaatgtctggaattgggatgaagagtggaaggtggaatggtatgaggacgggaaatatatgggtgaaatggagcatttcacaggttttgacccggaagcgaaggccatttgctcggacaagaaacgtgtagagtatgattggatttctccgataaggacagaacacatgttccgtgctcttcctaagaatcgtgaggctttaatagaagtgtgtgtgacagatcgttttggtaatgtatataaagttaagctatagacaatgatgaagacaaatgtaaatatcggatatctggtgttcctttcctttgttgcagccttgggaggtttccttttcggctatgatactgctgtgatttcaggaaccattgcccaggtgaccgcactttttcacttggatgcgttgcagcaaggctggtatgtcggttgcgcattgataggatctattgctggtgtgcttttggccggtgtgttgagtgatcggtttggccgtaaactgacgatgattctttccgctgtgctgttttccacttcagctataggttgtgctgtttgtacggattttgatgagttggttctgtaccgtattattggtggtgtgggtattggtgttgtctctatcatctctcccttatatatatcggaagtctccgtggctcaatacagaggccgtttggtctctttgtatcaattggctgtcacggtaggttttttgggcgcctatctggtgaatttccaattgcttgggtactcggaaagtcatgtggcttctggcacggggctgtttgagaagctctttatttctgaggtgtggaggggcatgttgggtatggagacattgccggcacttttgttctttgccgttattttcttcattcccgaaagtccccgttggttgatcttgaagggcagggaagaacgcggcctccgtatattgcaacgaatctacaactcgggcgaggaggctatgatccagatgaacgagaccaaatcggtgattgtatcagaggtcaggtctgaatgggtgttgttgttgcagcccggtattctgaaggctgtaataatcggtgttgccattgccatgctgggacagttcatgggtgtgaatgcggtcttgtattacggtccttctatatttgaaggggctggcctttcgggtggtgattccttgttatatcaagtgttggtggggctggtcaataccttgactactgtgctggctcttgtcattattgatagagtaggccgtaagaagctggtgtattatggcgtttcaggtatgatcctttcattggtattgataggcttctattttattgctggaaaatcatggggcatttcgagcctgttcctgcttgttttctttttgtcttatgtgttttgttgtgccgtgtctatttgtgcagtgatatttgtgcttctttcagaaatgtatcctaccaaagtacgtggtttggctatgtccatagctggattttctctttggattggaacatacttgattggacagttgactccttggatgctccagaatcttacccccgctggaacatttttcttgtttgctgcaatgtgtgtgccttatatgctcattgtatggaaacttgtaccggaaacgactggcaaatctttggaagagatagaacggtattggacacgtatgaaataaattgaccttatgaactaaaatataaaaaattatggactttaaaaaattagcaacacagtataaggatgaactgatgaatcatattcttcctttttggcttgaatgttctcaagatcatgaatatggtggatattttacatgcttggatcgtcaaggtaatgtatttgatacggataaatttatttggttgcagggacgcgaggtgtggatgttttcgatgctttataataaggtcgagaagcgtcaagagtggttagattgcgccattcaaggaggagaattcttgaaaaagtatggtcacgatggtaactataactggtatttctcattggacagacaaggaaatccattggtcgatccttataatattttttcatatacgtttgctacgatggcatttggacagttaagcttggctacaggcaatgaagagtatgcggagattgccaagaaaacgtttgatataatcttgtcgaaggttgataatcctaaagggcactggaataagttgcatacaggtacgcgtgacttgaagaactttgcattgccgatgattttatgcaatttggctttggagatagaacatttgctggatgcggattatctggaaaagaccatggaagtctgtatccatgaggttatggaagaattttatcgtccggaattgggggggcttattgttgaaaatatacaaatggacggacagctttccgattcgttcgagggaaggcaggttactcccgggcatgcaattgaagccatgtggtttatcatggatttagggaaacgtttggggcgtttggacttgatagaaaaggcgaaaaataccactttaactatgctcgattatggatgggataaagagttcgggggcatttattattttatggatcgtaaaggttgtcctcctcagcaattggaatgggatcagaagctttggtgggtacatatcgagactctgatttctctattgaaagggtatcatttgacgggcgaccggcaatgtctggagtggtttaataaagtgcatgattatacatggactcattttaaagataccgaatatcctgaatggtttggatacctgaatagaagaggtgaagttttgcttccgctgaaaggtggaaaatggaaaggatgtttccatgttcccagaggattgtatcagtgttggaccgttttagaggaaatagcaaattcataaatagaatctgtatgagcaaaatcatagtagtaggcagttcgaatacagatatggtagtgcatacctctcatttgccagtaccgggagagactatccttggtggtaagtttcttatgaatcaggggggtaaaggagcaaatcaagcggttgcagtgaagcggttgggtggtgacttgttatttgtagcgaaattgggtgatgatattttgggacagcaggccttgcgtgtttttcaaaatgaaggcatagcaacaaactatattgctttggataaggagaccccatccggagttgcgttgataagcgtggaccagcatgcggaaaattgtattgttgtggcttcaggagctaatatgtcacttggacaaggagacattgacagtatggagaaggagatgctgactggagatgtattattgatgcaactggaaattccccttccaactgtagaatatgctgcacagaaggcttatgaaaagggagtgaaagttgtattgaatcctgctcctgcttgttctttgccggaatctttgttccaacatctatatatgataactcccaatcggatagaggctgaaatgctgaccggagtcaagataaacagcaaaaaagacgtggctgtggcggccgatgttttgtatcggaaaggtgtgaaaaatataataataaccttaggtggcgaaggaagctttgtaagagaaggagaaaaaacttgttatatagatgcttgcaaagtggttccggttgatactacggctgcaggagacactttcaatggagctgtttgcgtgggtgtttccgaagggatgagtttggagcaagctgtattgtttgcatcaaaagcttcttctatttctgttacaagaatgggcgctcaatcatctatcccttatcggaaagagttggatataaataatttagtttaatctgttaaaagaggaatattgtggatagacgtcattttttgtcaatgttaggtttgggagcagttggtttggctctgccgggagtagctcaagcggatattttaaagcaagcggctgccaatccgaatataaagcctatttccggctcttggtttgaatttcagcatccgggaggcaaagaaggagtatattgggacaaagatttaagacagtttactgctgcccaatggagggaaaagattcgtgaaatcagtgagaccggtatggaatatttggtgatgatgaatgtagctgctcacggcaaagccttttttgatacgaaattggctcccaagtttgaaatgggttgtgaggatcctattgaaacagtgctttcagcggcagatgagtttggtgtgaagttcttcgtgagcaatgattattgggggccagatcttgatgctcatcggatgatgacagatagagaactgggtaagaaaaggaatcaatcgatggaagaaatctataagaaatatgggcatcaccagagtttttatgggtggtattttcctaatgagtcatggttggatccctatttttgcgattttgtgataccttatgtcaatgagtgcgcgcaagtggccaagtcattgaatgctaactgtgtgaatataattgctccatacaatataaagaaagaaaaatgtgatgattattttgtgaggcagcttgaacaacttaatgtggaaatcgtggcctatcaggatggagtgggagtcggttcaaccaggttggaagactctgcccgttattacgagaatttgtcgagagcgcatcaaaaggcaggacgttccagaatatgggctgacatggagttgttttactttgaacagaccactcatggcagtttgcttccggcagactttgacaataggatcatccatcaaatggaagctatttcacctttcgtggacaaaattttggtttaccagtatcttgggatcatgaataagcccggatctaaggctcatgccggcttgagaggagagacggtaaggttatataatcaatatatggattggtataacaggcaaaattttaaatgaataggatatgaaaagaattgtatattttttagtttctctgttgggatttaccaaattggcggcacaagatcctgctgattttgtccttccatctataataagtgatcatgcggtgatgcaacgcgatgccgaagtgaagctttggggatggtgccccagtgtttgggatttgaagattgtgtgcagctgggctcccaatgacacggttcatgtatcttctgataaatataaatattgggaaacttatgtaaacacccccaaggctgaaggaccgtacaccattcagttttatggttgggaaggtaaactttgtgcagaggtgaaagacattctgatgggagagacttggctttgttccggtcagtcaaatatggagtattgctttaagtggcgtgtggatgacatcaccgatagaagtacactgtttgacaataaaaagattcgttttttcaaggtggctaagtcatcctccgcatatccggttgagagaattcagggaaagtgggaaatctgttcccccgaaactgcagaagactttagcgtagtggctttttgctttgggaaaaagttgaatgaagggttgggcaatcttcctgtcgggttgatagggtcttattggggtggcactgccatcgagccttggattgacgaatttacgttgcgccatgagaaactggaagaaaagactaaagcattgactgccggatgggcaccgactgctaattcttctctttacaatgcgatgatccatcccattataaactacactattgccggggttatatggtatcagggagaagctaacaatgaaaggcatcaggattatggagtaatgtttgatgctatgattaggggctggcgtaatgctttccatcattatctgcctttctattttgtccagatagctccctggagtggctatgcagataaaaatgctgcgtatttgcgtgaacaacaagccgatgtggctgctacattaagaaataccggcatggttgtggtgggggatttggtaaacgacctgacagatattcatccgagtctgaagagacaagtaggagaacgattggctgatatggctttgaaaaatagttatcataaagaggatatacaaccgtattcgcctatgctaaaatcctttagagtagatggtcgtaaagtaattgtaacaacgactgctattggcaaacttgcttgcagggataaggccattcgccattttgaggtcgtggataaagagggcaatttgcatccggctaaggcttctatattaaagaatggagatataagtgtcattgccgataaggtgaaggaaccggtaggagtacgttattgtttttccaatgatgctatgcctgatttatttgatagtaacggattgcctttggctccatttagaacagatcgtaaaaaatgaaaaaatctttattatatttagtttgttgttttatttgcctctctgctttttctcaagcttctgatttgaagtttcgtgacgggaagttcaagattgttcagttgacagacctgcattgggtagagagtgattcttataaattgaagaatgacagcacttgtcatttgattcgtgaagttattcgtatagaagatccggatttggttgttcttacaggtgatgtagtagtttcttggaatgctaagaaaggatgggagaaattgaccaaaatattttgggaaacccaaactccttttgtcgtgacctttggcaatcatgatgaagaaacggatatgaacaatgcccagatattggactatctgtgtacacggccttataacctgacttatgatgctgaaaaaggactttctggctctggcaactgcatgttgaccgtccgttcttctgatgctgcatccgaaaaatgggtactctatttcttcgattctcacaataataccaaagatcgttcttttggctattatgattggattaagcatgaccagatagagtggtatagaaaaagtagcagtctggttactgctcgtaacaagcgcatattgccttccttggctttcttccatattcctctgcctgagcatgaaacggcaaggtggacatgccgggagtttggcgagaagcaggagggtgtttgtgctccaagtgtgaataccgggttgtactcttcatttatagaaaagagggatgttattggggtgtttgtaggtcatgaccataataatgactatatggttgatttagacggcaacataactttggcctatggccggaagacaggttatccttccgcctataatgaaacgcttagccggggggtacgtgtcattaatttgcatgaaaatgaatctgtttttgatacttatataagagatttgaaagggacctattttcattatcaatttgagcagaaaaacaagggcagtaatattcctcgtttcagtggttcctttgtgcaagagtttttggtgacaaattgggacgacgaacgttggaatcaggaaatggatatgctgaaagaagctggcatgaagtacctgatttatgcacctgcattgctggtggatgaaaaagggaaaacaactacaaattatccgtctgctctgacgaagaagcaaggcagcagaacgcttgaaaagtgtttgcaaagtgcacaaaaaaatggcattaaagtatttgtaggattaaactttaatgaacgctggtggaaagtggattatgatgctcactggttgctggaacaaatggaagtgggtaataaggtggcagatgagcttgttgccttgtataaagaaaagtatccggatgccatgcatggctggtattgggtttgggaggtggacaacttgaattgtatgacttctgaacgtcaatcaattttagcagaggcattgaatatgaatttgaaccatctttccgagattgctccgggaatgcctcttatgttgtctccgtttatgaattacaaggtgggtggaaatgctgaagaatatggcaagatgtggacgaacgtctttgcgcaaaccgacttccgtccgggagatatattcgctcctcaggattgtgtgggtgcaggtggactgaatttggataatttgtgggaatggttctctagtttgaagaaggctgtcaacactaaacctggactgaagttttggggaaatgtagagacattcgatcagcgcttttggactagtgctcctttggaaagggttcaaaaacagctggagattgtaaatggttatgtcggcaacctgatttgttttgcatacaatcattacaatagcccgtttgtagtcaatccggcgtatcatcaggcatatcttcaatattgccggacgggatgtttgcctataatggatattcctgagagagtgaagagtgccgctgtacgaaaggtggctaagggaatcgaagtcagttggatacctgatgaggtgaaagcggttgacggatacagtatctatcgtgatggtcagttgattatgaaattgcaaatacgtgacggacaacttccgaggacttttgttgatgcagaaggaacaatagataatgcttatgaagtggctgtttataatgtgattggcaaagaatccgctaaagtaaaggctgaatgacaactataaaattgataaatatgaagaatgtaacttttattatttggattttcgttgtactatgtgcaggctgcggttcttccacttcagttgtgcaggatgaagtctctatgactaaaaaacaattggctgataaagtgaaaggtggttgggcggcaaaaactattggctgtacttatggaggaccggttgaattcttgcataatggtactatgattcaagactatactcccataaaatggtccaaagatagggtgaaatattattatgatacatttccgggattgtatgatgatatatatgtggatattgtatttgtgaatgtgttcgaccgtttgggcttagaggcaccggccgattcttttgccgtttcgtttgctgatgctggatttcctttgtggcatgccaaccaagttgcgaagtataatattaagcaaggcattatgccccccatgtccggacactggttgaataatcctcatgcagatgatattgactatcagatagaagccgattttgcaggtctaatgtcaccgggcatgcctaataccgcttctgaaatttcagataaaatcggccatatctttacgtatggcgacggctggtatggtggtgtgtatgtaggagctctgtattccatggcttttgtttcagacgatatggagtatgtggtagaagaggcattgaatacaattcccgagcaaagtgatttttatgcttgtataaaagatgtgattggttggtatcggaaataccctgatgactggaaacagacttggtttgaatgtcagaagaagtggacttcggaagtgggttgccccgatggtgtttttgttccgtttgatattgatgcaaagataaatagtgcctatgtgaccatagggctgctttatggcaagaaagatttttatcggacaattgatgtttcggcacgttgcggacaagattctgattgcaatgcggctactgctgccggcatattgggtacaatgcttggatatagtaatattccggaattatggaaagaaagtctttatgaagtagaggacaccccatttgcctatacggaagtttcgctgaataagctttatgagttaagtttgaaactggctttggaggtgatagagcaggaaggaggctctattcagggagagcaggttgttattaaaacgcaacagccggttgctgtaaagtatgagaaagcttttgaaggccattatccggtagagaagaaggctgttaactttttgttgcaggattcttcagagttcatgtttgatggtaacggatttgttttgaaaggatatgtgaaatgttctgatgaatcgtatattgcgagtgttgcgatgtatgtggatggttctttggtagaaacagccaaccttcccgttgcaaaatctacttctatagacgataggagggttgatttgtttcatagataccagttgcctgatgcggcgcacacggttgttttaaaatggttgaatcctcgtaaagacgcacaagtttatttaggtgaggcggtaatttattccggccagcccaatcaattaacctataaataatcagtcgtaatgtatatagttgaaaattatggattggcagtagctctttgttgggttacaatgctttgctggggctcttggggaaatacccaaaagctggcagcgaaaacctggcgatatgaacttttttattgggattatgttgttggtattcttcttttctctttgatatggggatttactttggggagtacgggggatgccggtagagcttttgttaatgatatgcttcaggttgatgcttcaaacttctggagtgcgtttctgggaggtgtcatttttaatgcatccaatatcttgctgtcttcttccatgtcattggccggtatgtctgtcgctttccccgtaggcgttgggttagctctggtattaggagtatttataaattactttagcgtccctaaaggcgatgcaactgtgttgttttctggagtatttctgattgtgcttgctattatttttaatggtatggcttccggtaaagttgctaaaggaggaacagaccaggcaatgaggaaaaaggggattatcatagccgtgtgtgcaggcatattgatggcatttttctatcgttttgtagcggctgctatggatttagaaaacctggaagcaccgactgcgggtatgatgactccttattcagcattgtttgtatttgcagtgggtatttttgtcagcaacttcttcttcaatacattagtcatgaagaacccctttgtcggcaaaccgatggcgtatagtgactatttcagtggaaatatgaagacgcatctggttggaattctgggaggggctatctgggcattggggactgcttgtagttatattgctgcgggaaaagctggtgcggctgtctcctatgctttgggacaaggtgccactatggttgctgccttatgggggatttttatctggaaagaattcaagggcgcatctaagccaataaatttgctgcttgcgtttatgctggtacttttcctttcaggcttggggttgataattgtatctggtggtaattaaattttttatttttaaataatatactatgagacaaaaaaaacaaatgaaaatgtgggggctgttgggattgttggctgcattaccaataatttctgtatgggcaggaaataatggctctgacgaatctcgaaaagaaaaaatggtcaaatcggtttctgtgatacagcctattacaggtacgtggattaatttggcctacaaggacgtacggaataagtatactaatccacaacattttgataatacggatcctaaattatggactgctaaagtgcgtgaattggccaatatggggattgaatatttggtgtttatggaggttgccaatgaagggaaagcgtattatccgtcaaagttgatgccgtgggtatataatgataaattgcaaagccccgttgacgcgattcttgacgaggcggccagacatgatatgaaggtattcatgagtacgggttgggcaaaagaccaggatgacaacctgcttgatccggcaataagggagcgccagcttcagattatggaagaacttgcgtctctctataaaaatcataaggctttctatggctggtatcttccggttgaagattgtatttgccccatttttgcagagcatgctgtgcagtcagtaaatacactgacagagaaggctaagtccttgactcccagaaagaagaccttgatatctccgtacgggattggcttgtctgaattcgaccatcctgattttgagaagcagatggcaaagttgaaagtggatatcattgcctatcaagatgaggtgggatgtgtgcgtgacaagtttacccttcctcgtttgaaaaagaactggcaaaggatgcgcgatatacacaaccgtctgaatattgagatgtgggctaactgcgagacctttacttgggaggaaggaaccaatgaccgccagtctgctttgattccggctgcttatccccgtttgctgtcacagcaggcagcggcttctgcagccggtgttgataggattatttcgttcatgttcggtggaattattgaagatccgaagtcctcctaccaattggggcatccggtttggtctaatgatttgtacaacaattatatggcatggaaagaaggggacattttttggaaattgtttgaagcggctttgcttgaggcattgggcaattctgctacccccgaaatgattggcaaggctgacatgaaggcactggcagatggtcgggtagccgaagaggatagtggagacagccgttgggtaaggtttgaaaaaggtcatcatgaggtagtgattgatttgcaaaagaatacttcgcttcgaaaggtgctggtacgtactttgaactataatcaggaaaagataggtgctcctttgaaggtttatgtttacacttctcaagatggccagacttataatctggcttcaataaaggatgctccgtattttcctaacaacaagcatgatgcttggattgacggggtgttcttcgagaatctggatgaaagggcgcgctatgtgaagattgcttttgatgctttggaaaatgtatatatggatgagatatttattaatccagtaatcagatagaggatattgcaatgggattattacgtggggatcataggggagtgaagccgcccaagcgtgagttcgtaccatcgtattaatgtgtttgtccgtctttaaagtagtttagggctgttagagtttagtttatatggagccgtatccttgacagatgggaatcggacattgaatgcattgaaaaacttcatttaattatttaatcaatagaaaatctatgaaaagattacacacatcaatgaaatgtattgttggcatactgttggttgtcctgatggttgtgccgaacgggctgaaggccgaaaccacagaggtgttccaggcttctaaagtaacaggagttgttctggacgaactgggcgaaccggttatcggtgttaccgtgcgtgtcaagaatgacaagaggaacggtactatcacgaatgccgatggacgctatgtgatcagtgtctcaaaaaatgcgacattgatattctcttatataggttacaggacacaggaggtcgcagtgaagggcagaaatacggtcaacgtgacattgtcggaggacagccagatgctggaagaaacagtagtcattggttatggcagtgtgaaaaaacgtgaccttacaggtgctgtatcatccttgaaaagtgaggacttgctaaaaaccaaccctgtgagcataaaccagggtctgcaaggaaaaatggcaggtgtaaatgtgtctcaatcagacggtgctcctggtgcgggtatcaatatccagatccgtggtgcgaattcatttactaccagtacggaacctttgtatgtggttgacggcatgccgtattccatgggagaagggcgttctacagactttggcatgaagcaaagtaataaccccttgagtaccatcagtccgcaggacattctctccattgaggttttgaaggacgcttcggctactgccatttatggttcccgtgcagccaatggggttgttttgattactaccaaatcaggttctgagggaaagactaaagttcaactctctgccaatctcagtatttccaatcccgttaagagaatagatgtgcttgacgcatgtgactatgccttatatcgtaatgaacgaatcacgaacgggctgttgtatgacggttattcggaggctgacagttctttggaatatccattgcagggatattggtctgaaataaaggaacccgatcccatcacaggtgagatggtggtagtaggtaaggaatataagcccagcccttgggattaccgcaatggttttgattataaaggaaagatgttctatggaaccaactggcaaaaccagatctttcagactgcaattagccaggattacaatgttaccgtatcaggtggtgataagaaaggcagctacatgtattctggcgggtatacagatcagcaaggtgtaattgtgaattcttactataggcgttatacggcaagagctaacaataaccgtaaaatcaatgattttttagagttaggtactaatatcagtttcgcaacagcggataatcgttttgcccgtactaatagtgaaacttatggtgtgattcctgctgccatttcattcaacccgacccgtcctgtgtttgatccggataaagactcaggcttctcagaagatttttctaccggtttagccaatccctatctgactgtacacacggaaaagaacattcaggagacacttaatgtttttatttccagttttggtgaactgaagtttactgactggctgagatatcgtcaaaaatttggttatggttacagttactatgaacgtaatacctataataatcgttggaccggttccggaatctctcctactaatggatatgcgacgaaatccgatgacgcctatgaaagtatcacgacagagtctctattgacttttgataaaaaaattggaatccatgctgttaatgccatgtttggtatgacttatgaaaaatatatgtggcacagtaaatggatggcggcatccaatttccctaatgacatgaatgaagacaatgtgattcaagccggtattaaagatcgccggattgagagcagtagagggaaatctcagttgatgtcctatttgtttagggctaattataatttattggaccgttatttgtttacattttcaatgcgccgtgacggatctagcaaactgtcggaatcacatcgttgggataatttctattctggtgccattgcgtggcgtctttctgatgaagcttttctgaaaaggttgaatttttttgataatttaaagctgcgtgtcagtgccggtcagacaggagggcaaggtgtcagtgcatatgctacccgttctcgctttgtaacttctgattatggcatgggcggttctttacagagcggtatggctgaggaccgttggggcggtccggctgcaactcttttgaagtgggagacgaccaaccagttcgatgtgggtttagatattgctttcttgaatagtcgtgtaaacttgacggtcgacgcttattataagaaaacaaaggatttgttgcttgacaagcttatccccatgagttccgggttcagtcgtatacaggccaattatgggaatgtgacgaataaaggtctggaaatttccggacattttattcctgtcaaagtacgcaattttttgtggagcattgatgctaacatatcttttaaccgcaataaagtaggtggcttggattcagatcaatactcggatgttgcttgggggattgaaaatatgtttttggtacgtaatggtgagcctattggtacgttgtatggttatgttgaagatggattttatgataatgaggctgaggtacgtgcggatccttattataggaatgaaacggattctaaggtaaagagcatggtaggggaggtcaaatataagaattttgatgaggatcctgtgattgacaaccgtgatcgccagataattggtgacaccaatcccgatttccaatatggtataaccaatacattggaatggaaaaactggacattcagtttctttttgcagggaacacaaggtaatgatattcttaatgtcaatcttaagaagtttgatatggccagtgtggataatatgccttattttatttacaataatcgttggaccgcagagaatagggcaaatgctaaatggccacgagccagtagaaccagcacacgtgcaatgaaggcctctgaccgttacattgaggacggttcttatctacgttgtaagaatgtcagcttaagttatcgtttccgccatcctatcaaatttgtggaaagtatcaatctggcagtcagtgtctcaaatttgttcactatctctggttatagttggatggatcctgatgtgaactcttttggtagtgaccctaaacgtagaggtgtggatatggcttcctatccgagtgctcgcacattcaactttggtattcaaattggattttaaataattgatgttagtatgaaaatcaagaatattttaatgacattgggcttgggttccatgttgatgacttcttgttcattggatgaagaagtatatacatttatttcaggtgaggatcttgctgctgacggtgaatatgaactgctggtgaatggtgcttatcagccattggcttggttgtttgagtggggtagttatgactctgcggttaattatgataatgattatcagacaggtcctggttgggcttttaaggaaaccggaactggtaacttttataacaatggtagtattaataacctttttgaatattattcgactgccattcatcgtgctaactatcattactatttgataagtacgatgactaatgtggctgaaaaggagaagaataatgctcttggtgaacttcggttccttaaagcgtgggccgaatttgagctggtacgtcgctttggtcctattccaatatttaaaacgtctattaatgagggaaatgatacttaccagcctagagcctctgttaaggaggtatatgaagatattattgcaaatctaaaagaagccgaaactttgcttatgcctcgtacggatgccaattatcagaaagggcatgtttttcgtgcctctgctaaatcactgttggctttagtgtatgcgacgattggttctgcttcaatggagagtggcagggttatggtcaaaggtggtcccggcaaagtgactaatcctgatggtacagagtctgctctaatgcctcaggaaatttggcatgataagattcgtcttcctggttatgaggagtttgattcacaagaatattatagattggcgaaagaaaaggcgggtgaggtaataacagaaggtgagtgtacattggctgccagccagaaagacttgtgggctctttccaataagaatggtccagaattcttgttctgtcttcagacttatcctgatggagacaatttgtctggaaattatttaagtgaatcttattatgggtattgggatgatgatggcacgatgggtaaagggtattatacctaccgtgaccattggctacaaatgtttgatgattgggatgatgaacgcattacctggggaatcctacaccgttatcctggttcttacaattcagaaactggagtttatacttggtattactatccgttaagagatagtgtctatgtgaatcgtgaagaagcaccatatgaaggcatcgagccttatcagaaaacagaccagcctgcttatggcgcatattttggctctcgtttcactaaatttacggctgtaacgggcacaattgatggtacacgtaaagactataattggccgtttttgcgttatgctgaagtgttgctcctttatgcagaagctgataatgaattgaacggccctactcaagatgcattctccaagatggaaatgttgaataggcgcaataatagtacattggtgagtgaacgtcataagaaaaagccgtttgataaggaaactttccgttcgtttatcctcgaagagcgtgctaaagagtttgcggtggagggcaatcgccgtacagatttgatccgctggggtatttatctgcctgtaatgaacgccattggaatggatgagaatggtaatttgaagagacgtgaagaaaaacactggcttatgcctcttccacccgatgaaattaacggtaatccttatattgagaaaaataatcctggatggtaattgtttaattattaatggagaatacaatgaaaaagataataagtttaaaggagatgtactttgtttgtgcccttcttataggaatgtcttggacttcttgttctgatgacgatgaaacggctattcctataaaattggccagtataactaccattgcagatttagataaagtgattgttgaagctgctttgggtgattttatagctgtccatggaacaggtttggacacccataatattgattctattttgattgatgatgtcaaggttgatatgcaggaggtatataccgagaatagcattctgttcatgaaaattcctgtgaaattggcgactaataagaccaataaaatctatatttataattcaacgggctgttttgaacttcctttcaagactttggctcccgatttgaaactgacgcgtatgttcaatgagtataccaaaccgggcgatactattatgatttatggagattttttcaatttgtatgaaatcgattcactgaatgcggttgttgatttcaatggaaaggtttcccctgttatacggtctgctaataattatctgacagccaaggtgccggttgatgtggacaagaatatccgtgtcaaggtcaagggattgaagcacaatgtagaggcggtctgtccgggacgttattatgaccgtgaattcatgatcatggattttgatgaactgttgccaagcgatgtagccaatgttgtgaccgatgagaaggatccgcagcgtttgagcggaaattttttgagaattgatgaaaattctgtatatgtagatccttggtggtggtatattgcagaaaggggtggcattgaatatacggaggatatgctgggacttgagtcatgcaaggattatgtggtgaaatgtgagttccgtacatccaatcagttcatcaaggataaaataagtttcagtatttatcattattgggcggcagctccttgtgattggattgcaacagatttcaatgtccagaactttaatcggtgggagaccattacattaccgtggaatgtattccaatctgtggattatccagactattatccgggttcatacactaattttaatatgcttctgaaaatagatcctgaaatagcccgcaattttgctttcgataatattcgtatttgcaaaaaaggggattgatctgtattttgtagtgaggacggtaattaggtaatatatattgctgtcctcatttatattttgatataatttgttttgtaatactatttactaaatctgataaacaatatgaatttgaaaggatgtatggctgtgtgggctgttttagccataggaggatatgccctgcagtcttgtaatactgctccggtcaaagaggtgtggctggatgaacttggccaagactcatgctatgtgcaggattggggaactgttgagataaaccgttcggtcgtgcttacaccattgacagtcaatggtatcgtttatgagcgcggtttgggggcacattctatcagtcgtatactgtatgacttgaagagtgaggctgtgtctatttccggacttgctggtgccgacgataacaataggtttgccggcaagcttcaatttaaaatagtcggtgatcaaaaggaactttggaaaagtggggtcatgaagaaaggggatcccgttaaagaattcaatgtgagtctgaagggggtcgataaagtcttgcttcttgtagaggagtgtggtgatggtatcatgtatgaccatgcggactggctgaatgttaagatagaaactcgcggtgatgtgaagcctgttcgtgcttgggcaaaatccatcgctaaagaaaagtatattttgactccgccggctcctgaggttccggttatcaataacccgctggtttttggtgtacgtccgggcagtcctttcttgtggtccataatggctacaggtgaccgtccgatgatctttgaggcaaaggggcttccggaaggagtcagactggacgagaagacaggccgttttacgggtaaggcaatgaaggaaggtgattataatgttttactgaaggcaactaacagcaagggaactgccgaaaaggaagtgacggtcaaggtgggcggtgagatagccttgaccccttcgatgggatggaacagttggaattgctggggactttccgtggatgaccaaaaagtgagggatgctgcccgcatgatgagtgagaaattgcacgcgtacggttgggaatatataaacattgatgacggatgggaagcaccggaacgtaccaaaggcggtgaaatcctttctaatgacaaattcccggatttcaaggctctgaccgattatatccacggattaggactgaaattcggtatttattcttctccgggtgctaccacatgcggtggtcatgtaggcagttatcagcatgaggaaattgatgccaggacttgggaacgctggggagtggattacttgaagtatgactattgcggttatctggatattgaaaaggattcgaaagaagagaccattcaggaaccttatatcgttatgcgaaatgctttggataaggtaaaacgtgatattgtattttgtgtaggttatggcgctcccaatgtctggaattgggcggctgaagcaggaggtaatcagtggcgtactacacgggatattactgacgaatggaatgtggtgactgcgattgggaccttccaggatgtgtgtacagatgccacggcaccaggtagaaacaatgatccggacatgctggtggttggcaaattggggcaaggctggggaagcaaggtgcatgattcttacttgacagctgatgagcaatattcccacatctctttgtggtgcattctttctgcccctttgttgatcggttgtgatatggcaaatatggatgacttcacactgaatcttctgacaaacaatgaagtgatagcggtcagtcaggatccgatggtggctccggctagaaagatgcttgtcaagaacggacagatctggtctaagaaattgtatgacggttcttatgcggtagggttcttccatgtggatccttattttattctttgggatcaagatgatgctgaatccatgcagatgcgtgactatgaattcgactttgatttgaacctgctaggtattgaggggaaggcgatggtccgtgatttatggaggcagaaggacttgggagaagtggacggcagtttccagactaaagtgccttatcatggtgtcactttcgtaaaaataaccccaataaaatgaattctgtcaaatttggagaagaatgaagaaattatatttatccatcgcttttttgctgacttttactttccaggtccctgcgcaactgcagggactggatgtggtgaaagttccggaggcacagcagccatattccggagagtacatatatatacctgatgtggacggctataaggctctgaaatgtgattttcatgtacatactattttttccgacggggatttgaaaccggaaaaccgcgtatgggaaggggcgattcgtgggttggatgtcatagctatcacggatcatattgaatatcgtccgaacagttacatcaaagccgaccacaacgaatcttatagaagggccaagactattgaggcaagttctaaggttatagttattcaaggagcggaaatcacccgctccaaaccgatagggcacatcaatgcccttttcttgagcgatgccaatgcgctggatgtggatgaccctttgactgcaatagacaatgctctggcccaaggagcctttatcatgtggaatcatccgggctggcccaatgacacaagcactatctataaggtacatgaagagcttatcaggcagaagaaaattcatgggattgaactggtaaatggcttcgagtactacccaaaggcttttaattactgtaaggattacggtttgacatatatgggaaacactgatatacatggcgtctataggcagacgtatcgtacggatatacaaagcggtcctatgacagttgtttttgccaaggagcgttcggaggaaggggtaaaggaggcattgtttgccggacgttctgttgtgaagtttggagatattctgattggttctgagaagaatctgacggccttggtaaaggcctgtctgacatatgaggtgaagaatacgcatgataaccaggcgctggtgaaagtcatgaataaatctacactgaactttgaaatcctgttggataataagtcagttaccatattaggcaatgcaaccactgaatttaaggtccgcttgaatgacaaggcgaagttcactaacacttatattacggataacagccagctggtgattgatgtgtcgtctttacggtagggcttgtcataaacctttaattaattcgtatactatgaagaaaattttgattatacttttagcttttctatctcctcctttttttatggtgataatggggggatggattcattgaggcaagaaaaggtttatgttcatatggacaagcctttttatctggtgggtgataccatttggatgaaggggtatctggttgatgcgcggacgcataggaacaggatgtccggagccgttttctgtatgtggaattgatcagtgacagaaataaagtgctgctccgtaagaagataatggaggagaagagtatattccgtaatttttttcttggaggaagatattccagaaggggcggtataggcttcgtgcttacaccaatcttatgcgcaatgcagatgaatccttttttatacgcgacagtttgctgtctataaggatacggaatccttgcttatgttgaaggtgaggtatgagaaggagaaggaaaataggtacctcatgctactttgttacgtcgtgatggagaaccatactccaagaaaagcgtagagtatatggtctgtaccaaggattctaataataaagtctgtgtcggaagaacaaatttggcaggtgatatactggccacttttcaaagcgagcatgagggcattggctactttttattatctgcaacagatggcaattcactatacggttgcgtctgacagttcagaccaggaaaagcgctttaaattgctgctagctgtatccgatcgggttgccttgtctgtcacttaggatgattctttgatatactataggatgtgtgtccctttctgtctgcatgctggaagagaagttggtattgttgccccacgtatgtgggcaggtcgtacatcgtagtcatatctctacgatggaactgaggtctcatttccaagagggaaatgccggaggtgattgtacacttcactgcattcaatgcggtgaagaagctttgacggaacgccttgtctttgtccgtcagcatgcctctctttttcagatgtcagtgttgggctctccgacaaagagcagggcttttctgcatccggcgttgtctgggaattccttatggcaacctgaatgggcataagttattagtggccatcgctaaagatagatagggcaatttctgcataacccacgatttccctgatatgaggggattcataattacccctttctggaaaaaggcacaacactataagatccggctgaaggaggacacttatccatcagtcccccggcttttatggaggtctatggtcagggctaaggctgccgatatttgtacgaagtgaacaataagactgtcaacgggatgaaggtgtatcagcttcctgaggtgacgatacaaggagagtacactggtcctgattacttttatcagtccttttaagggcgatcactgtttgggggcatgagtgtctaccgataagtcttggtataattatgaatatatgaataataaatgtataataataaaaaacgagtattatgaaaggacggattttgtgttttgtgattgtagtgtgtagttttcttgttgcccatgctgatggagctgactcattggcgctgacccctcccatgggatggaacagctggaactgtttcagttgtgatgtgaacgaacggcagatacgcgagatggccgacctgattgtggcaaacgggatgcgggatgcgggttatacttatgtgaatgtggatgattgctggcaggtgggacgtgatgcggatgggaatattgtggttgattcggtgcgtttcccttccggtataaaagctttggcagactatatacattccaagggattgaagttcggcatttattcctgcgctggttcactgacttgtgccgggcgtccggggagccgtggatatcagttccaggatgctcgcacttatgcggaatggggtgtggattttttgaagtatgactggtgctttgatgaggggcagagtcctcagggagcttaccgtaccatgcgtgatgccttgaaggctagcggtcgtccggtggtgttctctatctgtgagtgggggagcagcaagccgtggacatgggccaaaggtatcggccacttgtggaggactacgggggatattatcaatgcctttaaaggtacagtacattggggcggatgcagtgttgtggatatcatcgataagaatgcggatttgtggccttatgctggtcctgggcattggaatgacccggacatgctgcaagtcggcaacggagtgctgactgctgaggagaaccgttcacattttaccatgtggtgtatgctggccgcaccgctgttggcgggaaatgacctgaggactatggacagggagacgctgtccattctgacgaataaggatgtgattgctataaatcaggacaagctgggcatacagggtcgtcgttacatgaaaatagaacagcatgagatatgggttaagcagttgtctgacggggaagccgctgtatgcttcttcaatcgtgacgaacagccgtggacattcgagtatcagtttgggaaagacaaatcccatctccactttgcggatatccggttttgggaattggagtatgatgtttatgatatttgggacgggaataggcatcttggcacctccaacgacaatctgagtttcaaagtccctgcgcacggtgttgtcttggtaagactttcccctaaaaacaaaaaataataatttgtcatggtaaaactacttttcagtgtaatgtgtatactcatgtctgtttccggctttgcccaggagcagatcaagatcaagcacggcccttatctccagaacctaaaggaaacggaagtgacaatagtctggctttcggataagccttctataggttgggtggagattgctccggatgatggtacgagttattaccgtactgagcgtatcaagttttttgatacggtcaatggcgtgaagaatgtttcggaattgcatgcggtacgtgccacgggccttgctcccggtactagctaccgttaccgtgtctatgccagggaggtgctttcccgcaggggggaggaggtcatatatggcaatgctacggctccgagtatctatgaccgccgaggattgaaatttaccaccaatgacagtagcaagtccgtggcctcttttgtcatgctgaatgatattcatggcaatacggactatatacctaaattgctggccgctgcggacttcaagaaaacagacatggtcatctataacggtgacatgctcaataacctactggatgaggaggagttgtttaaaggcttcatggacatctccatagatatgttcgctacctgcaaaccgttgtattatgcccgtggaaaccatgagacacgtggctcatttgccacttcctttcatcgttttttctctccgaaggaaccccatctgtattttttgatacggcagggacctgcttgcttcattttcttggataccggtgaggacaagcctgactctgatattgaatatcatggtatcaccgactatgacaattaccgtacacaacaggcggagtggcttgcagaagccgttaaatccagagaattccaggatgcgtctttcaggatagtgatcgcccatatgcctcctttgcctgaaactgacatctggcacgggcaggccgaggtcttggacaagttcgttccgatactgaacgaggctggagctgacgtgatgctgtgtgggcatttgcatgaatattttaataacaagcccacggacaaagtgcattttccggtaatagacaattcctccaatacagttttaaaaggtgtcataaagagggataggctggatattgagataagggatatgagtggcgggatagtggatacaatttctataatggcccgatagttttgttatttgttgttttggaacttggaataataatatttgatttgaaataatatgagaaacatgcatgatgtaactgtgaaatggattttttttctgcttttggttatggcgggaaaagctgcaatggctgaaggcattacctcaccggatggaaacctccggcttgattttgtggtgaactcttccggtgagcctgtgtatcgattgtcttataagaacaaagccgtggtgaatccatcgaagctggggttggaattgcaggacgatccgggcctgatggatggttttacacttgtggaggccaagacctcaacatttgatgaaacctggaaacccgtgtggggcgaagtggcacaaatacggaatcattacaacgagctggctgtgaggttggaacagaaggaacaggaccgtcatatcgtcatccgtttccgcctttatgatgacggtttgggattccgttatgagttccctttgcaaagaggtctgcactgttttacggtcaaagaggagcatacccagtttgctatgacaggggaccataccgctttctggattcccggtgactatgacactcaggagtacgactatactgagtcccgtttgtccgaaatccgcggcttgatggataaggcggtgacggtgaatgcctcccagtttgttttctcgcctacgggtgtgcagacctccttgcagatgaggacggacgatggtctgtacatcaatctgcatgaagcggctttggtggactattcctgtatgcatctcaacctggatgacaaaaaactcgtttttgaatcgtggttgacgccggatgttttgggaaataaggcctatatgcaggctccctgcaaaaccccgtggcgtactgtcatggtgagcgatgatgcccgtgatattttggcctccaagcttaccctgaatctgaacgatccttgtgcatatgaagacgtctcatggattaagccggtgaagtatgtaggcgtgtggtgggagatgattaccggccagaagtcatggagctatacggatgaactgattgccatgcgttttggagaaaacgactatactaaaatcaaaccgaacggccggcatggcgccactaatgaaagagtgagacgctatatagactttgccgccgaacatggtttcgaccaagtattggtggaaggctggaacgaaggatgggaaagttggggagggagctctcgtgacttcgtgttcgactttgtgacggcctatcccgactttgacgtgaagatgctgaatgcttatgcacacagcagaggggtcaggctgatgatgcatcatgagtcttcggcttcggtacgcaattatgaacgccatctggacaaggcctatcagttcatggcggataatggctataactctgtaaagagtggctatgtaggcgatataatcccccgtggagaacatcactgcggacaatggatgaacaaccactacctctatgccatacaaaaagctgccgaatataagatttgtgtgaatgcgcacgaagcagtacgtcctaccggtttgtgccgcacctatcccaacctgattggcaatgaatcggcccgtggtacggaatttgagccttacgacggcaataagcccttccataccaccgtgcttcctttcacccgtctgattggtggtccgatggattataccccgggcatctttgacatttacctgaattttatgaatcatgacaatcacgggcagattcattccacgctggcaaagcaactggcattatacgtcaccctctacagtccgttgcagatggctgccgatttgccggagaattatgaatctcatttggacgctttccagttcatcaaggacgtggcggtagactgggatgagagcaagtatctcgaagcggagccgggagactatatcaccgtggcccgtaaagccaagggtacggagaactggtttgtgggaggcattaccgatgagcacgcacgtacttcagcttttgttcttgactttctggaaccgggcaggcaatacgtagctacgctttatgccgatgccgaagatgctgattttgaaaagaatgctacagcttaccggattaggaaaggtattgtgacgaacaagagcaagatgaatgtgaagctggcgcgcagcggtggatttgccctgagcttgacagaggccacaccggaaaatatgaaaggagtaaagaaatggaaataggttgaccgttagatgccatttttattaattaattgaaacaataatgcctatgaaaacactgaaacagaagatgctctctgtactctttgtggggttggcgatagcatcgtgtactcatgatttctcggagggattccgtcctccagagatgaagctgacggtatcggaagcccgtacggcatttgaacgtgaagcggacgctttggacatcgttccgtttggtgcgggtgctgtcacgcgttctttggatgatgacattgtcattacgcctctttggaatgaggctgtcagtttttccgatgcagagggcgcttatgttgttgtccctttcaatctgcctttaggcaagatttttgcaagaaagcaatttgatgaggaaattcccgaagatgagaagtttgccaatacggatattcgcttgtttatagaaaagaaacatgaaaatgagtatctttacagcataatccatttaaccggtaattattcttatgtcatggaggaaagtaatgacatggcctcgttgcgattggatgatctggcatctttctccggctctatccgtcattacagtctgcaaggtgaaatgatgtggggggatatttatcatcatgggcggattgtgggaaaaatttctgctatacctgagccaagcagagaagagctggattctctgagagacaaccgcggctcggtccgtcctcgtggttatgtgacccgctgtgaccctcatttggtggaatatgagatttgttatcatacgggttatcctacggctgaaggtattgtagagactcatgtagaatgtcattttgagtatcgttgggaggagtattgttatcagatatgggttgaagacggtacggacaattatcgttgtcctaattgtggtgatcctaattgcaacggtagttgccggcctacccctccagatccagatggaggggtaggccggtcttatctcaaaaggctcaggctataaagaaaaagcttgatgtcacatttgcaggtttgatagataatatcaagaaagtggtgagaatgaaagagggcaagaccggtgacggcaatctggctgagggcgtttcagacaaggcaaccatttctgaaatattatataagaatgtacctttgactctgactttcaacagttcgcttacggaattgcaactaatgatcgtgatggcgcatgaatatacacatctcgaattgcttgagaaatccagaaccgctggcagcagcaatgaatttgcacttaaagagcctgaattgttgtcagcaatcaacaattcgtccgagccaacggattgggggaagataaatgacgggcaccatgaatatatgggcagccatgtggacaagatggaagaacgtttacgaagtgctttccccggtcagagtgaggacttctataagtatggaaaatggggaggaggggctacgagttctgatgcgtttctgaaattgacgaaatcggagagagataaaattatcgaatatttgacaaataataatttataataatgcttatgaaaaagtttatcttgttatatttatttacactgtgtactgtactgtgtgcgtattctcaatctgctgtctatgtgatttttactcctatagaatcagataccaaatgtgtagagcattccgtttttaatattcataatttgggcggaggtgtagttcatattttcactatatttgaacttgcgaaaaatactcgtaaaaaattgtatttttatagatttgagtatgataatcggaaggacaacgttgataatccattccaagttaagtccaaagactttttaaactctgtcaatcttgtagattgggatttggtagaaggtaagaccaatgtcgagtctaaatttaaatatataatgtctcatgataaaatatattttatagaccggaatgagtctacgaatgattctgtgaaaatatatcctgtaaaacgatgggttcctaagtattaatgttgtagaagccggttgatagcttataatttatttatctaacggtcgcttattcataatatggcttttagccggcttttatctttagtatattgtatttctgccatataaggtactttgtaaatatgctgagggcataaacgaactctcattgataaagtcaatgtctgttggtttgtaaccaccaagtagacatgttgttagctaaaaaataacgcttatgaagaaacttatcctattacatctatttacactatgtactgtgctgtgtacgtattcccaatctgctgtctatgtgattttcacttctacgaactcggatgataaaggtgttaataatcttatttttgatgttcaggattgggatagggatgcagggcatctatttagtatatttgaacgtgctaaagatactcgtaaacaattgtatttttatgattttatatataaaaaccataaggacaacgttgacaatccatttcaggttaagtccaaagactttttaaactctgtcaatcttgtagattgggatttggtagaaggtaagaccaatgccgagtctaaatataaatatataatgtctcatgataaaatatattttatagaccggaatgagtcaacgaatgattctgtgaaaatatatcctgtaaaacggcgtgttcctaagtattaatgtaacagaagctggttaatggcttataatttatctaacggttgattattcatatcaataattcatctgaggtgatggattggggaagataaatgacgggcaccatgaatatataggcagtcatgtggacaagatggaagaacgtttacaaagtgctttccccggtcagagtgaggacttttataagtatggaaaatggggggaggagctacgagttctgatgcatttgaaaatttgacacaatcagagaaagaaaaaattaatgagtatttaataaagaacaatttgtaacaatagcgattatgaaaaaaataattttcttgcatttatttgtactgtgtaatatattatatgtatattctcaatcaagtgcttatgtgattttcacttctacaaaattagatattaaaggtgtgagtaaacaagtttttgagattagagattgggatagagatgctgttcacatatttagtatatttgaacgtgctaaagatactcgtaaacaattgtatttttatgattttatatatgaaaatttgaaggacaacgttgacaatccatttcaggttaagtccaaagactttttaaactctgccaatcttgtagattgggatttggtagaaggtaagaccaatgccgagtctaaatataaatatataatgtctcatgataaaatatattttatagaccggaatgagtctatgaatgattctgtgaaaatatatcctgtaaaacggcgtgtccctaagttctaatgataaataaaatctgtatattccaacgcaatgaaaaagctctatcttagtaaagaacttttattgggtggggcaataattgcagcaccgttgtgtagcttggtgatgacgggcgtattccaaaatgatatgccattgttcccactcttgattatttgcctgctgacgcttttcttccgactgctattgtttttgaagactggcagaaagataaaagaagtccgtctgacagcttgtgacatagccgttgctctgtttataagctatatcttcctgcgatggctactgcaaagggaagatgttgcggagctttcaatattcagatggtttctgtttgcagtggtttatattttggcgcgaacggtgaatcataaagaaacgcttttttcagcgttgatattatctgcatcattacaagcggttgtggcccttttgcaaaaagtgggttgtttgtcgagtctccatcctctgtttgatgtgacgggcactttcaacaatccgggaccgctgggcgggtatcttgctgtgggattggttgttgccgttttattgtatgcttcctcttttcggcattggagtacgagaactgtcttgaaagtagcttcgataggtgttatgggaactgcattttattgggctgattcacgcgccggtttgctggcagttgcggcaggattgctgatggcttatggggggaagatgaaatttttcggatggcgtggacgtgcgtggtgtgtgtgtctgtcggtggcggctgttgcatttgtttgtatcctgttgtttgcctatcgcccgttgtcggccaatgccaggttgctgatatggcgggtctcatcggatatggtgatggacaagcccttattgggacacggtgtaggggcgtttgaaaagaaatacatgttctatcaggcggattatttcagaaatcatcctcaatccgattttctgaatgtagccgacaacgtgacttatccctataatgaactgttgcatattgcagtggaaaccggaatgtgcgggcttgttttgttcctgctggtggcggtgtcaccgtttgtcttttctgatgaaaggacattgaaggccgtattggctgcttggctgatattcgccatgttttcatatccggtcaatgtggtgccacttatgatgaactttgcattgttcacaggattgtgtcgtggcaaaactgtgtctgttctgggtgtaaacagaattttttgtggaattgctgttgttcctcttatggggttattggcggtgtgtggccatgtaatgttgtttttctgtgaaagttcaacattgttgattgacgtgcttggcaggaaggttaggaatgtggagcaggtggatttgttacaaaagctgccgctttcttgcgaaacatattgtatgcgcggtgatatatatctggaacggaaaagctatgggcaggccgaggagtcttataaagttgctgcagaaatgattcctacacgtatacgccccaactataaactgtggaatctgtatctgttgcaacaagatactgtgaatgcccgaaagatggctttgcatattctggcgcaacgggtaaaagtggagaatacattttccattaaggtgagggggaggatgaaacagtttcttgatgaaatagattaaaaatgatggcgggatttatattgcggaaatattttaggaatggaggcttcaacgtgatttcagggcttgttgcggtcttgcttgcctgttcctcctgcttttctgatttgaaattggaacgggctcttgtggctgctgaagagaacaggtccgagctggaaaaggtgttgaagcactactctttggacagtcctgaccgccagaaatataaggcggcggtttatttgataaggaatatgatggactgctattccttggattatgtgtatggggatgagtacgtgcgtgtgatagattctctgagcaatataaacgggactcccgtgcaggaggattttatgcgggatgttgacagtataagccggtgcttgaacagaaagatacttcaaagcggttcggtgataaaatgtgatttgagacatcttactgccgggcagttgataagacacattgacatgagcttcgagtcgctgcgttatccttggacgaaggaactggatttttcggatttttgcgaatatgtactgccgcataggatagggcatgaaagactggaagagtggatgacagactataggaacagcatgaaggtcgctcttgactcgtttgcaaggaccgctatggccgattcctgcatttgcagttattatctccgcaaatatgcggaaagggatttcttttatacgacgattgtaccggagctttctccatcgtcactgctttattctacgattggcttgggaaactgcaaggagttacaggcgttgactgtctattcgttaagaagccttggcattcctgttgccattgatttcactccccaatggggaaaaaggagtttgggccacagctggtgtacactgatcggcaaaggttatcagcttccgtttcttttttacgacaaagtacctttgggtgaacaccttgcggatatgcggaagcgtgacgggctggcaaaggtatacagaaggatgtatagcgaacaagagggcacattggcaagccttttgccgcaggaggagattcctccactgtttgaggacaagcatttgaaagatgtctccgagctctatttcactccggtggcggcaacggtaaacttgtcgttctcgcctcctgaaaagaaggagtatgcttatttgtctgtgttcaataataagggatggattcccatagactggggccgtatcaagaatggaaaagttgaattcaagaaggtcgcaaagggtaatgcttacctggccacttattaccatcggggcaagacgtacccggcatcgaatccctttattgtggaggagaacggtgatacaaggttattggcccctgatgtcaactcctttacttctgtttttttaaggcggaaatatcccgacaagaagcatgtctatgaattgtcaaggagtcggacggtaggaggccgttttcagataatggctgatgtctccgagcgatttaccgatgtatgtacgatagatgaattcccggaaacactggctccggtttcgattgtatttgatactcctgtggaggcaacggcactcagatacctgtctgctcctgactcgaatgtctttctggcagagctggaattgtatgacgagcaggataacttggttgagggggagataatcggtacggatggtagttggtatggcaatggccgtgacaaatataaagtgtttgaccatgatatgttgacctactttgatgcgcctgtatcctctggtggttgggtaggactgtcattcggtcgcgtccggaaaataaagaggatagtatatgctccttacaatgatgataatgggataaacaagggggagctgtatgaattgttctattttgatgcgggctgggtttcgctgggagagaagtatggtgacagttcgtatacaatgaactatgacagggtgcctcggaatgccttgcttctgttgaggaacaagacgaaaggacaggaggtgcgtatatttacacaggaggatggaaagcatgaatggtggtgaatctgatatgaatcatgaaatgaatgatacggtttccttattgttgatggtgacgatgttccagtctgtagccagcctgctaatagggatattcggctatagcagaaactttgccgttttcggtgttgctttccttatggtcggatttgtaatgcggtgggccgctcaatttttaatgataagttttcattggtgttttattaaaattgagccactaatgtagctccttctaactcctgactataaggaatgcaggttaaatcaaagaaccgtatgcttgactttgaactttagcctcaatctttagctattcccgtttcaatcattaacagaaaacattcaaactattaaagaaaaactttcgaagtataaaggataaagtgggtagatatagggagaaaaagtgctcttcagtcttggtctgtctatcccaagccttgggatagacagaccaacccctgggatacatgtccgcaggctggggataaactttgtgtaacataactcctgaatagggattgtgcaggctgtgttattcataattggaggaaaagaagtttcattgccttccccgataaatgtaagcattcgaagaaatgcaccttttacactttgaggtttggttgtagctttgcggcagtgaatacaatcaaacctcaattattatgaacagacaagaatttgaagaattagaattgcaggtgcaacaaagcgagctgccgttgaagtcgtaccttcaacagataggtgtaagttattcaacctatcactactggcgtagaaaatgttccgttgacaggagcagtatcaaacacgagttggctcctatcagttttaaacaggcatttacggagtcttcccaagaagaacaattgccgcatggtgttgcgctgctgtttcccaatggacttcgtgcccacttcgggagcggttctgaagatttgctgaaggaaatatttacccaaagtcttcgagacggtcatgtttaacctgaacgacacgatgcgctacttcctgtgtcctggcaggacagatatgcgcaagggtatcagttcgctatgcggagtggtacatgagaaaatgaacagtgaagtgaggaacggtgatgtcttcatcttcatcggttccagccgcagactaatgaaactccttcatgccgaagacggaggtatggtaatgtatgtaaaacgtctggaggccggtcgcttcaagctgccggagtatgatcccaaatcaaacagctatcccatggagtggcgcgatctggtgatgatggttgaaggaatacaggaaaacccggaacagaggctccggcggttaagagccgaacgtaaggaataccatgtataacatgttttttgcgtgagtaaactttggatattgttgcataattcactgttaattagtatatttacatcattaaaagaagtatagacaatggaagaaaaagaaattttactcaagacgatagaagggctgaatgcctctatagcctcattgtctactactaataagaatcaatccgaacagataaaaaatctgcaggaacgtatcaaggagttgacggctcaggtcgcatggctgaaccgtcagctctttggtcgtaaatcagagaaacttcgcgtatatgatcctaatatgccagacctctttgccgacgagttttccggactccggcagcaggcggaagaaaagcgggacgaggctgtggaaaagattgagaaggaatcggtggaagacgtaaaacgaaatcgtcagaaccgcaaaatgatagaggacttgcccgtattggaaaccgatacaatagaaccgaaaggcgtagacttgtctttataccgtagaataggcgaagagataacaaaagtcgtcaaacacaagccgggaatgctttacgtcaaggtgatcatccgtcccaaatatgctctcaaggatagtaccctgcttcctccagccggacagaaaggcgtagagatagctcccatgccgctgatgccggtcgacaagtgcattgctgacaccagcctgcttaccgagatactgcttcagaagtatgaatatcatgtcccgttctaccgtcagatacagcaataccgccatcttggaatgaaaggccttaccgaaagtacactggacggctggttcaagaaaaccgtggaactgcttaagcctctgtatgaagaactcaaatgggaagtcttctcctgtgactatgtacaggcggatgaaactacagttccggtcattaacagagaaaaacacagagccgacaaggaatatctctggatggtaagatcagtcatggagaaactggtcatcttccattacgacgggggatcacgggccggagcggtcatcgaatccctggcaaatcaatataacttcaagggatatcttcaatgtgacggttttgcaggttatgaaacagccttcaagaccaaccccgacgtgcggctactcaactgcctggtgcatatacgccgtcattttgagcaggctttggatgaaaacagggagatggcgcaacatgcactgactcagatacagcatgtctataaaatagaacgccagtgtgacgaagccggcctgtcatatgatgagcgcagacagacgcgtcaggaactgtccaggccaatcatggaggcaatgaaggtatggatggagacagaaggaattaaatacagtccaagttctttgacaggcaaggccataacatatgcctataccaaatgggataatattatgagatgtctggacgatggccgcctgtactgggacaacaatctggcggaaaatgtccaacggcccatcactctgagcagaaaaaattttcttttctgtggtaatcacgaagctgcggttaatatgtctgtcatatgttctctgctggccacatgtaaggcgcacggggtaaatcccagggtatacctgaacgatgttatcgcacaaatgccttatcacaaaaaggcaacccaagaagaacttttgaatctacttccacataaatggaagttgaaacatccggaatgtgtactgacaaggcaaaaggaggaatcttgtaactgatataaattgtaacatatgggttcaacaaaacaatagcggctgatactattaggttcatagtgacagtcgctattgttgtatataaaggtttaatacctgtagttggccgaatacttaccgataaatagggcgatacagaaaaaaggtgaaggatgtgcaggctgacagcagaaagattatttcagagaacatagttgccgacaggtcaaagctaaagattatttgtgtatttttgcaccgaatttatttcggtaggataccttatgagaggcaataccgggggaaaaagcgcaaagcaatgaatataactgaactgcaacaatcttatgcttcccatcccaatgtagagggggtgtgcaggcttctgaaagataactctgtccgtcacctatattgcggaggtttatatgcctctgccgcttctttgttttcgtctgtattggttcagcgggctacttgtccgctcgttttcattctgggcgatatggaggaagccggttatttctatcatgatttgacgcagatattggggacagagcaggtattgttttttccttcttcatttcgccgcgccatcaagtacgggcagaaggatgcggcaaacgaaatactccgtacagaagtgctgagtcgcctgcaaaaaggagaagaggggctttgcgtggtgacctatccggatgcgctggccgaaaaggtggtctctcgtaaggaactgggggagaatacactgaaactgcatgcaggcgagaggggggatatggactttgtgacggacgtattgcgcagctacggtttcgaatatgtggattacgtttacgagccggggcagtatgccgttcgtggcagtattatcgacgtcttttccttctcttccgaatatcccttccgtatagacttcttcggcgatgaggtggaaagcatccgtaccttcgaggtggaaacacagctctcgaaggagaggaaagaaagcatcgtgatagttcccgacttgagccatagcctggaaaaaaggggaagcggcggcatggtgtcgttcctcgatttccttccgtcggacagcttgcttgccatgcgcgatttcctctggctacgcgaacgcatccagaccgtgcacgacgaatcgctcaccccacaggccatcgctgcccgtgagtcggaggagaatggagccatcacgctggaaggcaagctgattgatggtggcgagttcaccctgcgcgccctcgatttccgccggatggagtttggcaacaagcccaccggaacaccggatgccaccgtctcgttccatactacggtacagcctatcttccataaaaacttcgacatggtggcggagagtttccgcgaatacctctcccgtcactacaccatctacatatgcagcgacagcctgaaacagaccgaccgcatccgtgccatctttgaggaccgtggagacaacatatcctttaccgccgtagaacggacactgcacgaaggctttgccgacgacactttacgtatctgtatctttaccgatcatcagctgttcgaccgctttcacaagtataacttgaagagcgacaaggcacgcagcggcaaggtggccttgagcctgaaggagctgaaccaattcacccccggcgactatgtggtgcataccgaccacggtgtggggcgttttgccggactggtacgtatccccaacggtgacaccacgcaggaggtgatgaagattgtctatcagaacgaagatgtggtgtttgtctccatccactctctgcacaaggtttccaagtacaagggaaaggagggtgaagcgccccgcctcaacaagctcggcaccggagcctgggagaagctgaaagaccgcaccaagacgaagataaaggatattgcccgcgacttgataaaactctactcgcaacgccgcgaggagaagggtttccaatacagtcccgacagcttcctgcaacgggagttggaagcctccttcatctatgaggatacccccgaccaaagtaaggctacttccgacgtgaaggccgacatggagagtgcccgtccgatggaccgcctggtgtgcggtgacgtgggcttcggcaagacggaggtggctgttcgtgccgctttcaaggctgtggcggacaataagcaagtggctgtactggtgcccactaccgtacttgcctatcagcatttccagaccttcaaggagcgattgaaaggcttgccttgccgggtggagtatctgagtcgtgcccgcaccgctgctcaggcaaaggctgtagtgaaagggcttgccgaaggggaagtgaatattcttatcggtacccaccgtatcctgggaaaagacgttaagttcaaagaccttggtttgttgattattgatgaggagcagaagttcggcgtctccgtcaaggagaaacttcgccaattgaaggtgaatgtggatacgctgaccatgacggctacacccattccccgtaccttgcagttttcgctgatgggtgcgcgcgacttgagcgtcatccagacaccgccgcctaaccgctatcccatccagacggaagtgcacaccttcaacgaggaaatcattgccgacgccgtcaatttcgagatgagccgtaacgggcaggtattcttcgtgaataaccgtatttccaatctgtttgagttgaagaccatgatagagcggcacattcccgattgccgtgtctgtatcggacacggacagatggagcctgccgaactggagaagataatctttgatttcgtcaattacgattacgatgtgctgcttgccactaccatcatcgaaagtggcatcgacatacccaatgccaataccattatcatcaaccaggcgcagaacttcggcctcagtgatttgcaccagatgcgcggacgtgtggggcggagcaataaaaaagctttctgttacctgctggcaccacctttgtcctcccttactcccgaagcaaagcggcgtctgcaagccatcgaaaacttctccgacctgggcagtggcatccacattgccatgcaagaccttgacatccgtggtgcaggcaatatgctcggtgccgaacagagcggtttcattgctgacttgggctacgagacttatcaaaagattctctccgaagctgtgcatgaactgaagaccgacgagtttgccgacctttatgccgaagaactgaaagcagacggaggcgtcatcagtggagaacagtttgtcgacgaatgccaggtggaaagcgaccttgaacttctgttgcctgccgattacgtgactggcagcagcgagcgtatgttgctctatcgcgagttggacggattgacactcgacaaggatgtggatgctttccgttcccgcctcgaagaccgcttcggcccgattcctcccgaaacggaagaactgctgcgcatcgttcccttgcgacgcctggctgcccgcctcggcgtggagaaagtctttctgaaaggtgggcgcatgtccctgttcttcgtctccaatccggacagcccgtactatcagagccaggctttcggtaaggtcattgcctacatgatgaaatatacccgtcgttgcgacctgcgcgagcagaacaacaaacggagtatgctggtgaaggatgtcaggacggtggaagaagctgtctgtgtgttgcaggaggtagtggcaatgcaggtggaggagtaactgttgccactcctgccactaacgtccgaactgcaaggagaatcccaaattgaagaaagtgatgttgtttttgaaccagctatgatctactccgtcatcatagccgtccgtgttgtaaagtcgtgcatcggggttggcaaaccagtctgctgttaggaaatcacagcgaatcatacccgagagtttacagctgatgcggaactcatagcctgcagcgaaagttattccacaatatcctttatggaaaaggtgtccgttccgttcaccgcgtttatatgtccgttcttgatagttcatatacccgatgccgaatgataggaacagtccttgattaccgttgctccacaagggacggtatgtgatgttggggcgtatgcagtgcagatgtgccttatccggtaggcgggccatgcgcagatagtcatattgaagtcccatggcaaataggggcgtgatgtagtagcggccttctgtcatgaggtcatatcccacccggttgccgttcttgctgaagaagtcgttgcggtttccttctacatggggcaaggaaacaccgccaccaaggatgatgctgtaattttgcggtaggcattcgctttgtgccagcatccctgtcactccgatggagagtagggatagacagaggaggaatcgtttcatgcagttgctgtgagtttcttggaaatatcgtatttttatcgtttcccgtatagcttgtctatcaaatccgtccgtcctatccgccgcagttcgtttatgatgttcctgcgctcttcgggtttgtaccagaagaagaattggcgttgagccagtttctcgcgctgcgttttggcactgaataccggttccagcgtataaggatggaagcccgtgtaccatgcttcggtggcaacggtcatgggagtaggggtaaagtcttgcacttgctccagatggaagtccagtcgcttggtgatgacggcaagctccgccatatcctcttccttgcatccgggatgactgctgatgaaataagggatgagttgttggcgcagtccttcttcacggttaattctgtcgaatatcttcttgaactcaccgaactggctgaacggaggcttgcgcatgatgttgagcacgcggtctgacgtatgctccggtgctaccttcaggcgaccgctgacatggcgggcaatgagctcgcgggtatattcctgcgtacttttgttagtgttcgggtccttgctctggtgcagcagcaggtcatagcgtacaccgctgccgatgaacgacttcttgatgccgggcagggcatctacggcatgatagatgtcaagcagcggacggtggtctgtattcagattggggcataccttggggtagatgcacgacggacgcttacatttcctgcagacggcctcatcccgtcccttcatgcggtacatattggccgacgggcctcccaagtcacttaagtaacccttaaagtcgggcagctccatgatagctttcacctctttcagaacgctttccttgctacggcttacgatgaacttgccctgatgcgcggagatggtgcagaaggcacaccctccgaaacatccgcgatgcaggttgacggagaactttatcatgtcgtatgccggaatacgttttcccttgtacttggggtggggcaggcgcgtataaggcaagtcgaaagaatggtcgagctctgcctccgtcaggggaggataggggggattgactaccactgtctgtttgccgaccttttgtaacatgcgggatgctgtatatttgttgctttcctcctcgatatgacggaagttggcagcttctttctttttatccttcagacattcttcgtgggaaaagagggtaatatctccttcttctgcagctacctccttgtcgagatagaccatttgcggaatatcggcaatgagctgtttgaagcctttggtgtccattatttgttggcatttcagcctattcgcaagttccaccaccggtttctctcccatgccgtagatgagtgaatcggcaccgctgtcgaggaggatactggggcgtacacggtcttgccaatagtcgtagtgcgtcaaacggcgcatacttgcctcgatgccacccagtatgacggggacatcgggaaatagttgctttaatatccgggtatatacaatggaaggatattcggggcgcatatccggacgtgcgtccggtgtatatgcgtcatcactgcgcaagcgtttgttggcagtgtatttattgaccatcgaatccatgcagccgggactgatgccgaaaaacagacgggggcgtcccagtttcttgaagtcgcgtaagtcgtcgcgccagttaggttgggggacaatggctacgcgtaatccttcagcttcgaggatacgacctatgacggcggctccaaaagacggatggtccacgtaggcatcaccgctgaaaagtattacatctaattcgtcccaaccacgcagttccacttctttcttggtggtgggaagccagtctgtaaggcgatattctttcattaatacattgtaaactgtaatgtcattcgttctccgtcgtaaatctcacggaaacctatctgctgctcggaaagatactctttcatgtcattgaaggcagtggcgttgtccatgatgatttccagcttctcgcctttcccggccttgcacatggcttttatggcagggattagagggctgtaatgctgttgtccgcaggtatcgatggttttcatttattcttcttctatttctatagtgccttgttgggaaagccattgcagatagagcttaatgagttgctgcagtccgaaggccttcatgttgttgtgatagataacgtcgatgcagaggtcgagtaggtctttgctatcttcctcttgtgcggcgatgagggagcgaatgttcagtttcaacttgtcgagcactgtttcgtctacaatgccgttgctgtcgatgagatggcggaagagtccgtacttctcaatggtggcaaggttttcttctgaaacttctaagctgcgggttccgctggggttggcttgtatggtgtacatgatgtttaatgtttagtgtttaatgattaatagaagcaaagatagttttttcaccacagattacacagatttctacagattatttatagggattgctgtttttctctgtgttgctctgcctaatctgtggtgagaaagcgaagtatcgaggccataattgcatttctggacgtttcttccctgatactttcaaaagggaatcccatgatgaaggtgcggtaatcgctgccttgataggccacggcggcagatgcgttgccggtggcataggtcatgactggaaaagcgggagacatgggcaggatgcaatcaggggaagtgaccggatagtcctgctcattcggcagtcggggaagggtgaaagtacgccccagcccttggacagcgattttatccccgtctgttttcaaggaatttccataccggtacttcagaatattctggataaaatccctattaccctgcgaattgtccatgtcgctgcccacataggcgccgctgactaggagattgcctcccgaccggcaatacgaagccaatatgcgctgcatggatgaggagaatgtcttgtagtatgtattgcgtgccggattgctggaattgtcttctttttccagcccgaggatatagtctactatcggatagtcctctaaagagaggatgcctttttccacagcctcatcgctgcatgagacgaagctgtagttaccggcggcttgtatggccttgccgtgtataaaggggtaatcgaaagtatttccgataattttcataccttcgtattcctctctactctctcccaggcgttttcccgcttccttccggttgaagttctgctgggtaccgcagagggagatgtcatagagatagggaacgccgggatcttgcgataggtcgaaacctacagtctcgggagtgtctatgacggccggcccactgatacggtcgaatccgttgacgataagtatctgtcctttttcccgtttggctttataggcagcaaggatttccgaagggaagctttcgccgccccgattcacggcggttactttgaaggaatagacgatgcccggttctatttttacggtatggaacggagaactgacacgtacgccattgtcaaatcctccacgtccgatacgtgtatatacaatgtattcgcgtggtttggcagtcggttccaacgggtcttccttgccttgccaggagagctctaaagtatttttctttttaccgaagcggatggcaaagtggctgacgggaagcggctggaccatgtactctttcccgtgctggttgcatatatattgcagaatggctttatagagtgcacgtccgacggtgaacttgaagttggggtcatgccccagacgcatatctgcgaagttctggtgagacaacagttctacgatggtggaaggaacggcgggcaggcgcgtttcactatagttgcggttccataggctgcgacgtgtccagtctacgttgaaggtggagcggatgtcacgctgcaactgcgtcagtaggacgtccgagaggtcgcgggaggcatggcggtctgtaccggcattcagcctgccgttgttgaagttggtggtataaatgcctagagtgcctataatctcattttccttgctgaaaccggcatcgctgtgcagggccatactcatttcaaaggggatgcccaagccttcttctgccgggttgaatactgatttcccggcaagataattcaccgtacgggaacgtgcgttgatgtcatcgttcatatcattcttcccctcgtagcctccataaacagagtaaggcatgcctgcccattgggcagagtagcgtgcgccttccaggtatctgggcaagccactggtttgtcctccgcgggcaatgttgcccatgcctcctccaaagcggacggcatcggcacagaccacgcctttctccttgctttcgttgctcaataccaccatgccatagtcattccggcctttgtcgaaagtgaatgtgccgaggtacacccatgtgccgcctcctatttgctggttcaccttgaattctgtgacgcctccgttgtggaatacaaggtatttggcatcgcttacgctgcccggcagagtctgataagatacgtatacggcatattctcccgtttccggaatatcgggcacccattcggcaaaagccttgtctttcttcttttcagttttggcaaagcgtgccgtaccggtgaggaaagggttttcattgtcctgatagattcgtttccgttgggcaaatccgggttgggaggtctgttcccaacgtgctttccggcttttcacgtccagatagagggaaccttgtcctccatctctgcttaggctaccgtcattgtctacgatgacttcccgcttttgtgtgtccctttcgcggggagtgaatacattggctcctgcattctccagcatgggcaggaggtagggcaggatgaacgactgggtgaactggtcttccgtggtgcagaacagcctcgggcgttgccatccccatttgttcttgtcattgatgtaatatttcccgtggctttgccaaagggcaatgtgatttccttccagtcctcgggtgatttcgtaggggcatgaagtacgggttacccaaggtatacctttgtattccaagtgactgaacgtacgtgccttgtctttcttccctttccggtagaggttggggataagctcttcaatgtttttcccatcagcaaagacggtgaggtcgaagttgtttactggtcctggtaggatttgtcccagatggcggtaaatggcatcgacggtttcaggccgtagaggctggtaggcaaagcgctcgtttgcatagacaagtaatttcttcttccggaagtcaatgcggaaactgtctagcttgcaggtaccgatgttggtcgtatgggtggtgtattccttaaagaatgtctggaggcgttcttccacattctgctctagttcttgtgccggaaggaggattccatataagagccatatgccggttaggataagttttttcatattgatgaaataatgaagttgtcaatatctgcttttatcagacagtgatgcgtgcaaaagtacataaaagaaagcttcgttgacgattgcggttattttctttttattatttttgcagacatatataatatgtaaaccttatgaagacacttttgaaaagcagtattgccttccttttgcttctggtaccggttttggccttcgggcagcaggttctccaaatcatgaatgtcggtgcacgccagataacgtcccttgacggacaatggaaaacgattgtagatccctttgaaaacggttattatgactatcgtttgaagccttatgacggcggttatgcccaagacaagacttattctgataagacccaacttcaagagtatgattttgaaacggataaactgctgtttgttcccggtgactggaatacacaacggcctcagttgtactattatgaaggcactgtgtggtatcgaaagcattttgaatactccctgcaaccgggcaaacgtcttttcctcaactttggagctgttaattatgaagccattgtatggctgaacggcaaacgtctgggcaggcatatcggtggctttactccttttaattttgaaattaccggccttttgagggaaggtaccaatagcctcgtggtgaaagtcgataacaaacgccatcccgaagctgtgcctacggtcaatgccgactggtggaatttcggtggcatcacccggccggttaccttgattgaaacgccttcgacttacatacgtgattattacgtacaattgaagaagaatgataaagatacggttgaaggctgggtacaactggatggttctgccaaagagcaaaagatagtgctggatattccggaactgaaagtgaagaaagaggttgtaacggactccaacggttatgcttcgttccaggtaaaggccaaaccggtcttgtggactccggaaaaacctaagctgtatgtggtgaatctgtcttccgaaacagataaagtctctgatgagatcggcttccggactatccgtacagagggaactaaaatactgttgaacgatgaagagatattctgcagaggtatcagtatccacgaggagactccctactatagcgggcgtgcctattcaagagaccatgcccgtactttactgagttgggcaaaggagcttggatgcaattttgtccgcctggcccattatccccacaatgaagagatggtgcgtgaggcagagcgcatgggatttctggtatggtcggagattccggtgtattggactattcattgggagaataaggatacctatcagaatgcggaacagcagttgtgtgatatgattgcacgtgacaagaatcgatgtaacgttatcatctggtctatagccaatgaaacgcctcttagtgaaccgcgcctggcattccttaccaagctggcaaacaaggtcaggagtttggataatgtccgcttggttggtgcggcgatggagaaggaagaagttcgtccgggcgttatgactgtgaatgacccgttgggagaactccttgacattatcagctttaatgaatatgtgggttggtatgacggcgattcggaaaaatgtgaccgtgtgaactgggtgttcgatgcccggaaaccggtctttatcagcgaacttggaggaggtgctttgtatggacggcacggttccaggaaagaacggtttacggaggagtatcaggaagatttgtatatccgccacgtgaatatgttgaagcgtattccgggactggccggtactacaccgtggatactgaaggatttccgctctccgaggcgtcatgtacccgaaatacaagatgattttaatcgcaaagggctggtgtctgataaaggacagaagaaaaaagctttctttgttttgcagaaatggtacagagaattggaagagagttataaataggatttgtccgatacatattaaaaaaagaggctgtctccataatgaaaatttggagacagtctctttttatttttttatatttcatccgtttatagcggaatgtattccacgaaggcctccatcgcttcataggaagcaagtccgaggctgtcgtacaaggcggctgttccgcggttgcggtcttcactgcgttgccagaacagacgttcgtcattgcccaggaacggtgcactttccatttgtgactgatgcttcaggatagagttacgcttggcacgcagttcctccgggctgatgggcacagccatttcgatattttcgatttcccattctgcccatgcaccgcggtacatccagatgcggcattccttcaaccatttggcaccttcttctttttccaggtcgatggcggcaaatacggcatccgtacaaacacggtgtgttccgtgcgggtcggctaggtcaccggcaacgaaaatctgatggggtttcacttcacgcaacaagttgcgtacgatttccacgtctgcttcgctgataggattcttctgtatcttgcccgtttcgtagaacggcaggtcgaggaagtggcagtgatccaaaggtatgttattgtatgtacatgcggtacgtgcttcgccacgacgaatcagccccttgatggtcaggatgtcgcgtgtatccatgtcaccgtctttcttctccttcagatacttgcggatttcggcatatttgtcgttgataacctggtcctcactgttgttgaagatttggttgaacccgttgatgaagtgcaggaaacggataacttcttcatcgcctacggcaatgttaccggaagtttcgtaagccacatgcacgtcatgtttctgttctaccagacgacggatggtacctcccatagagataacgtcgtcatcgggatgcggagagaatacgaccacgcgtttgggatagggctttgcacgttcagggcgataggtgtcgtctgcgttcggcttgccgcccggccatccggtgatggtatgctgcaggtcattgaatatcttgatgttcacgttataggctgagccgaacaatgccagcagttcactcaaaccgttttcattgtagtccttgttggtcagcttcagaatgggttttccggtgagttggcatagccagacgatggcgctgcggatgagcttgtcgttccattcgcaggaagttaccagccaggggcgttggatacgtgtcaagttggcggcggcagacaagtcgatagctacatgtgcattgttgtgggtctgtagataagatgcagggatagtatctgttaccggaccttcaacgcattctttcaccttttgtgctttctcctcaccccatgccagtagatatattttctttgccgagaggatggtggctactcccatggtgatggagctgatgggggtattttcaatgctaccgaacattttggaagcttcattgcgggaatcgctgtccagcaatatcagacgggtggtagagttctggcgtgaacccggttcgttgaaaccgatgttacctacacgaccaatgcccagcaaagcgatatctaagccaccgaaactttcaatgcgctgctcgtaaagacggcaatattcaaagatggtgtctttggcgatggtgctgtcgggggtgaaaacattctgtttgtcaatgtccacatggtctatcagcatttccttcaatgcgttgaagttactgttgatggcattgggagctaatggataatattcgtagaggttgaatatgactacgttgcggaaacttaatccctcttcctggtgcatacgtaccaagtttgcatatacattgcgcggagagttaccgcctgccagtgccaagacacagaaacgtcccgccttttgcttgtcacggattaactgtgcaatgtcaagggcaatttggttggcgccttcttctgcagactcataaatatctgtagggattttttccagtcgggtcaataccgaccgttcaaatgcattctcaggtctgtagtacctgggggagactctgttgagagtgatttgagagcttagattggttttcataaaatttattattaataaatgattaagtattgtactgttctttcaatcaacaaatatacgaaaaacaatgttcatccgcatattgctgaagattaattaagaaatactgttcgtcccatatctcatatggggtttgacagccgtacggaaagtgtcttcggtacattccataaagtcatggccaatcgccaccgtgagtatggattttacgttgggtcaacataggatttaggggttagaattattaaattaatcatgttgtcgctttgacattgtttcgaaggacaaaaataggtactttttggagaagatgtactctttctttggggtattttcattaaatactctaaaaaagcggattgggtgcattttgtataatgtctcgttcgtttggggtataagtgaggataatcatataaaaatagaccattcattgcactttttgtcgtttgggtttgttatatttgtgtgtgtttataaactctaaaatattaatgtatgaaaagctggaaagtagaagcagccatcatagctgtggggttgcttttgttgggaatcatggtaaaaggcggtatcaacaattttgtgaataaggatcgtgtagtcagtgtgaaagggttggctgagatggaagtacctgccgacaaagtagtctggcctcttgtctacaaagacataggtaatgatcctgcactgctttatgccaatatggagaagaaaaacgctgccatcgtgggtttccttgaaaacaacggcattgagaaggaggaaataagtattgcaccacccgaagtgattgacatgcaggccgaacgttatgttgaccgcaacgtggcttatcgttataatgccacgtctgtcatcactgtcacttccaagaatgtggatagggtacgtaaactcatgtccgggcaagcagaactcttgaagcagggcattgccatcacgggaggggattataaatataacgtgtcttatgaatttaccggtctcaatgaagtgaaacccaaaatgatagaagaagctaccaaaaatgcccgtgccgcagccgagaaatttgctaaggattcggacagtgaactgggaaaaatccgcaatgcctcgcaagggcagttttccatcagtgaccgcgatgcttatactccttatataaaaagcgtacgtgtagtgactactgtgaactattatttgaagaaataacgaactcgtccgcatctttccaagcgggaaaatttaacctgaactcctgcagggaggaaaggctgagggaggcggtggcagttgtctcttcgttgtcgggtacagtggcaagcacttcccccttcggagagtagaccacactgcctccgctgtgtggaatgtctctgccgtctctgccgatacggttgacaccgcagacataactgatattttccaaagcacgtgcttgcaacagaatgtcccagactttccggcgggaaacgggccagttggcaacataaataagaaggtcgtattcgctgtgcttattgcggctccaaactgggaagcggaggtcataacatacaagcaacagtatgttccagccgcgatactggataatgggacgttggcagccggaagtgaaatgctctgtttcgtgtcccatccggaagaggtgtcgtttgtcgtaatagtaggcattgccttcgggcgtaaggaagaatgcacggttgtagtaggagggatttcctcctttcgaggctgtttcgcaggcaatatagctgcctgtaagagcgagttggtattcttcagaccatcggcgcagagtcgtgatggtttctcccgttgtaggttcggccaagctgctggtgtccatactgaagccagtggagaatgtttccggtaaaacaacaatctccgttgttccacgaagagtttctaacttctcgcggagacgacggagattttcttgtttattttcccagacaatgtctgtttgcagaatgcttattcgcatgacattaatgcttaatacctgattagatatttcctaaatcaaaattttcgggattttttcctttaaagttcttgaagtacagttttatctcgcgcatatccttttctatgtctccggtaggcatgacagttttggtagaggagatggtcttggaaggataatcaatcccgataagcataatgggtacttgtgctttcagtgctatgtaataaaagcctttcttccagtttggattggctttacgggttccttcgggagtgatggccagatggaaatgcttactggcggcaaacctttctgtcatttggtctaccaaggaagacttgcgcccccggttcaccggaatgccgccaacggctttgaatatcactccaagaggaaaaaagaaccattcctttttcatcatgaagctggttttacggccgatggcaccataaaacaatttaccgataaataagtcccaattggaagtatggggtgccgcacaaattacacatttgtcgtagttgggcaccgtcacatttgtcttccagcccagcagacgataataaatgaagctataaaaggctttcttcatcttatttcagtttgcccattgcattaataatctcgtctacttttgcattgaagtcagtacgaagttttttgtagaaaccttttacatttcctggttcggtatggctgatgcggcttatgaattcatcttgcatttttagaatttcagccatcagtgtatcggctttttgtttgtctgttccaggtacatataagctatttacaagacactctgtgaataattcacccgcaatatagtttatattcttttttagttcttttctacttgccataatctttacgtttaaaatgaataatctgagttattttcggtaaagataatgtttttctttgttagtgtagaggaaaaaagggtttttatgtgtttttaatttattacttttgtggaataattctacaaactgtggatgtattccacaaggtaaaatggaagatgcccccatgaataaagaattactatcttatcttctgtctgatatatagcttattagatgtaacggataagatagtggtggattggcatcgaatttgctttgatagaaggaaatagggttaaatttaatagacaaacaagcatgaaacagttttttacgaaaaaagaattaaagctgaagaagaagaggctactgatgatggttgcctgcatgacggtattgttggctggttattttattctgacttggcctaagaaggttgaaccggaagctcctaccgtaatcgtagaatctgcagaaaaaggagatgtagagatatatggtgagtacgtgggacgtattcgtgcccagcagtttgtagaggtacgtgcgcgtgtggaagggtatttggagaatatgctttttgcagaaggaacatatgtcaccaagaaccaggtgctttttgtaataaaccaggaccagtatagggcaaaggctgacaaagtccgtgcacagttaaagaaggatgaagcgcaggcattgaaggcaaaacgtgatttggagcgtatccgccccctttatgcgcagaacgctgccagccagctggatttagacaatgcccaggctgcttatgagactgcagaggcctcggtagcgatgagccaggccgatttggatcaagctgaattggaattggggtatacattggtccgttctccgctatcgggacatatcagtgaaagaaatgtggatttgggaacattggtcggaccgggaggcaagtccttgctggctacgattgtgaaaagcgatacagttctggtagacttcagtatgacggcattggattacctgaaaagcaaggaacggaatatcgatatagggcgtcaggactcgacgcgttcctggcagccgaacattacgattactttggcggataatactatttatccttataaggggtatgtggactttgccgaacctcaggtggacccgcagacgggaacattctccgtacgtgcagaaatgccgaatcctgacagagtgttgttgccggggcagtttacaaaggtgaagctgttgctggatgtacgtgagggtgctgtcgccgttcctcaaaaggcagttaccattgagaaaggtggtgcatatatttttgtgatgcgccgggactctacggttgaaaagcgtttcattgagttgggacctgaatttggcaacaattgggtggttgaacgtggtctggctgccggagaacaaattgtgacggaaggtttccacaagctgactccgggtatgaaagtacgtgcccaggttgccgttcctaaaaaggaggaagaacagacgagtgattctctgaacaagcaggttgtttccgaaacgaagcagactactccgactgagaataaatcaaaggacaacaacccttcaaagtaatgatgttatgaaagtaagtttctttatagaccgcccggtattctcggcggtgatatcgattgtgattgtaattgtcggtatcattggcctgaccatgctgccggtagaccaatatccacagataacgcctccagtagtgaaaatcagtgcttcctatccgggagctagtgcattgactgtttcgcaggcggtggcaacccctatcgagcaggagataaacggtactcccggtatgctatatatggagtccaacagttccaattctggaggattttcggctacggtcactttcgacgtgtctgccgatccggatttggctgccgtagaaatacagaatcgtgtgaaactggcggagagccgtttgccggccgaagtgattcaaaacggtatttctgtggaaaagcaggctcccagccagttgatgaccatctgtctgacttccagtgacccgaagttcgacgaaatttatttgagtaactttgctactatcaatgtactcgacttgttgcgccgtatccccggtgttggacgtgtttccaacattggcagtcgctactatgccatgcagatatgggcgttgcccgacaaacttgccaacttcggactgacggtgcaggatttgcagaatgccctgaaggaccagaaccgtgagtctgctgcgggtgttttgggacaacagccggtgaatgggctcgacattactatccctatcactacccagggacgcttaagttcggtaaagcagtttgaggatattgtggtccgtgccaatgccaacggttccattattcgtctgcgcgatgtggctcgtgtttcattggaagcatcttcatatagtacggagagtggaatcaacggtgagaatgctgctgttctcggtatttatatgcttcccggggccaatgcaatggaagttgcaaaaagcgtgaaggctgctatggaggaaatcagtgcaaatttccctgaggggatgagttatgagattcccttcgacatgacgacttatatttccgaatccattcacgaggtatacaagacgttgttcgaagcgctgattctggtggtactggtcgtatttctttccttgcaaagttggcgtgcgacggtgataccgattgttgcggtacctatttccctgattggtaccttcggtttcatgcttattttcggtttctctctgaacatactgactttgcttggattgattctcgctatcggtattgtggtggatgatgccattgtggtggtggagaacgtagagcatcttatggagacggagaaattgagcccgtatgaagctaccaaaaaggcgatgaatggattggcaagtgccttgattgctacatcattggtgctctgtgccgtatttgtaccggtaagtttcttgagtggaatcaccggacagttataccgtcagtttaccattactatcgccgtttctgtgttgctttctacggtagtggccctgacacttagtcccgtcatgtgctcgctcatattgaaacccgacaatggaaagaaaaagaacatagttttccgcaaaatcaatgaatggctgaacttgggcaatcacaaatatgtggctgtcattaatcgggtcatcaagaatccccgccgcttaatgagtgcgttcgggctggtactggttgctattttcattatccaccggttggtgcctaccagcttcctgccggtagaagaccagggctattttaagatagagttggagttgccggaaggtgctactttggagcgaacccgtgtggtgacggatcgtgctgtgcaatacttggagaagaatccctatgtggcctatgtgcagaacgtgacaggtagcagtccccgtgtgggtagtaaccaggcgcgcagtgagctgacggttatcctgaaaccgtgggaagaacgtaagggaatttccatcgataagataatggagaatgtggagaaggatttgaaggaatatcccgaatgcagggtttatctttccacgcctccggtcattccgggattgggtacttcgggaggtttcgaaatgcagcttgaggcgcgtggagaagcaacgtttgacaacctggtgcaggcagcagatacactgatgtattatgcccagaaacataaggagctgacggggctttcatcatccttgcagtctgaaataccgcagctttattttgatgtggaccgtgataaggtgaaaatgctgggtgtgcccctggcggatgtattctctaccatgaaggcttataccggttctgtatatgtgaatgacttcaatatgttcaaccgtatatataaggtgtatattcaggctgaggctccttatcgtgagcataaggataatatcaacttgttctttgtaaaggcaaaggacggagcgatggtgccgcttacttccttgggaaatgcctcttataccaccggtccgggcagtatcaagcgtttcaatatgtttactactgccgtcatccgcggttctgcggcacaaggttacagttccggtcaggcaatggagattatggagcagattgcgcgtgaccacttgccagacaatattggtctggagtggagtggcctttcctatcaggaaaagaaagcgggaggacagacgggccttgtgcttacgctggtattccttttcgtattcctctttttggctgcgcaatatgaaagttggacggtgcctatcgctgtattgctttcactgccggttgccgctttgggtgcctatctgggcgttgtgatatgcggattggagaatgatatttattttcagattggcttggtgatgctggtgggacttgcggcaaagaatgccattttgattgtggagtttgccaaggtgcaggtcgacaagggaggagacttgatacagtctgccatccatgctgcccaactccgtttccgccctattctgatgacttccctcgcttttgtattgggaatgcttcctatggtattggcaagcggacctggctcggcaagccgtcaggccatcggtacgggtgttttcttcggaatgatatttgccattgtattcggtattgtgcttgtaccgttcttctttgtcctggtatacaagacaaaagcaaaagtgcagcataagattaagaaagactgattttaaagacaacatttatgaaaagaaagaacatatatattattttgttgctgagtatgtttgcccttacctcatgcaaggtgggcaagagctatgtgcgtccggagatggcattgccagatagcctggcacagcagcaggatagcatgagcatagccgatgaacagtggcaggcggtttatacggacagcacgctgcgtggtttgatagatcgtgctctggaatataacaaagacatgctgatcgcagcttcccgtgtcaaggagatggctgctcaaaaacgtatcagtgttgccaaccttctgccgcagctcaccggaaaagtggaggctgagcgtgaggtggagaattacggtggtcatagccgtgatgtaggcaattcttacgaagccaaggcattgctctcttgggaactggacctttggggaaacttgagatggaagaaggtggctgctgtggccgaatatctgcaaagtgtggaggcgcagcgtgcgttgcgcatgactatcgttgcggaagtggcgcaggcgtattatgagctggtagcccttgatacggaactggagattgtacgccagacacaaaaggcgcgcgaagagggagtgcgcttggcccgtattcgttttgaaggcgggctgacctcggagacctcttatcagcaggctcaagtggagttagcccgtacggctacgcttgttccggatttggagcgccgtatctctctgaaagaaaatgatatctctttccttgtgggggaatttcctacccgtatcaagcgtgtcaattttctgcaggaattggatgtgccggagtccttaccggtaggtctgccttcggatttgttggaacgtcgccccgatgtccgtgcggcagagcagcagttgaaggctgaacatgccaaagtgaaagttgcttataccaatatgttcccccgtctggccctgaccggacaatttggattggaaagtgatgtgttgtccaattttctggaatccccctattccttattgaatggggcggtcttggcaccgcttttcggttggggaaagaaccgtgctgcactgaaagcgcagaaggcttcttttgaagccgaagtgcatagttatgaaaagactgtgctgaatgcttttaaggaagcgaagaatgccattgtggatttcaataagataaaggaggtctaccaactgcgtgccaaacttgaacgctctgccaagggatatgtggatttggcacagttgcaatacatcaacggcgtcatcaattatatggatgtgctcgacgcccagcgtggttattttgatgcccaaataggggtaagcaatgccatccgcgacgaacttattgccatggtaaatgtctataaggcattggggggcggctggcaaaccgaatgacgtgtgattaaagaaaactgtaagggcgtgtatatactatcaaatatttcggtacatacacgccctttttctataattggcttatttcatctgggattctgtatttagagtctccttgtcttctttctttttctttgccttttctacttcaagagctacgtttacggcattcatgcctttaaggccacgttcaaggtcgaacgtcacaatattgccttctgttatatctgtcagcacattattaatgtgaaaaaagtatttttcgactccggataagtccttgatgaagccgaagcctttcgattcattgaaaaattcgatacgtcctctgcggatgaccggttcttccttgtcttttttgggagttgatatgacgatttcttccagctttatttcttctttaggagtgttttctgccggaggagtagaggttatcatgccgttttcgtcaacataggcaatcatatcttcaaagctattggctttgttggatagttttttttcttctttctttttttgtttttcagctcgtcgggcgagtcttttcttttcattttcacgcttgtctgcggagatggatttggccatgtatttttatttattgagttataaaaaaagcagggggtattgctacaacacctcctgcttttgtcagtagttaagaatattaatatcttctagagttgtaaccgcctcttctgtcgcgattgccgccattggaaggtctttcttcgcgggggcgtgccacgtttaccgagatttgtttgtggtcaaattcagcaccgttcaattcgtcaatggctttttggcctgctgcatcgtccggcatttctacgaaaccgaaacctctggatcttcttgtttctctgtctgtaatgattcttgcagaagaaacttctccgtactctgaaaataaatcgtttaagtcagcgtctgttgtgctgaaatttaaacctgaaatgtaaatgttcatttgaaattttaattaattgtaattattaaattggagtatggagaataattatggaagagaccgcctaataatagttgtatattaaaagaagaacaatgcgataacgactcgtaactcaaactttgcggcaaagataacacaataaatcagttaattgctttcttctcctttttattttaggataaaaaacgataaatgtcattttatacattatttcggcctctcgtttgcatatcttacgaaaaaaagcgaaatttgcgacgcttttaaacggaactttactaacacctttaaataattaagagaaatgactaaaagtgcattgcaaattgcaagggctgcctatcagcccaaacttccgaaagcgctgaaaggaactgttaaggctgcagaaggcgcagctactcagtctgttgctgaccaggaagaaatcaagaaattgttccccaatacgtacggaatgcctttgattaagtttgaaactaccgatgaggtggttaacttccccgcaatgaacgtgggtgttatcctttccggtggacaggctcctggcggtcacaatgtgatttccggtattttcgacggtatcaagaagctgaacaaagacagcaaattgtatggctttattctgggtcctggcggcttggttgaccataattatatggaactgactgctgacatcattgatgaataccgcaatacgggtggttttgacatcatcggttcgggccgtaccaagctggaaaaggaagaacagtttgagaaaggttatgaaatcctgaaagaactcggcatcaaggcattggttatcatcggtggcgatgactccaacactaatgcttgcgtactggctgaatactatgctgccaagaattatggcgtgcaggtaataggttgccccaagaccatcgacggtgacttgaagaatgatatgattgaaacttctttcggtttcgatactgcttgcaagacttactctgaagtaatcggcaacatccaacgtgactgtaactctgctcgtaaatactggcacttcatcaagttgatgggacgttccgcttctcatatcgctttggaatgtgcattgcaggttcaacccaatatgtgtatcatctctgaagaggttgaagctaaggatatgtctttggacgacatcgtgaccagcattgccaaggtcgttgctgaacgtgcagcccagggtaacaacttcggtacggttcttatccccgaaggattggttgaattcatcccggccatgaagcgtctgattgctgagttgaacgacttccttgctgccaatgcagaagagtttgctcaaattaagaaatctcaccaacgcgattatatcatccgtaaactctctccggagaatgcggccatctacgcaagcttgcccgaaggcgtggctcgccagttgtctctggaccgcgacccgcacggaaacgtacaggtatctctgattgaaacagaaaagttgctgtccgaaatggttggcactaagctggctcagtggaaagaagagggcaagttcgtaggcaagtttgctgcacagcaccacttcttcggttacgaaggacgttgcgctgctccgtctaacttcgacgctgactactgctactctttgggttatgcagcatctgcattgattgctaacggaaagaccggttacatgtcttctgtacgcaacactactgctcctgccgaagaatggattgcaggcggtgtgcccatcactatgatgatgaacatggaacgtcgccacggtgaaatgaagccagttatccagaaggctctggtgaagctggacggtgctccgttcaaggcattcgctgctcagcgtgaccgttgggctatggaaacagactacgtttatccaggccctatccagtacttcggtccgacagaagtttgcgaccaggctacgaagactttgcagctggagcaggctaaataagttgatgcatcaacaagttgacaataaaacggaggggcggttcattccgccctttcttttcctttgctcatggcaaccaagacctccacaaatatccggcgtaaaactactgccgcccgtcgttcttcctctccgcggagcaagaagaaaatgcagccacgtaccatgcccgtatggttgcgcaatcttttggcggtctgtatcattcttgttttttctaccggcttttactggtttttcattcgtccttatgcttatcgctggaagccttgttatggtcagaaaggttacggtgtatgtatgccttgcaactatgaggtgcatggcatagacatatcccactatcagggaaagatagattgggaactcctgacacataatagagaagcccaatttcccattcactttatttttctgaaagctaccgaaggcggcgatcatggtgacgatacgtttacgcagaacttcggccaggcgcgtaaatacggttttatccgtggtgcctatcattattttatccctaagaccgatgcccgcaagcaagccgatttctttatccgtaccgtgcagctggcaaagggagacctgcctcccgtacttgatgtggagactaccggcaagcagtcaccgcaggaacttaaaacggcagtcaagacttggctggatagggtagaggcgcattacggcgtaaagcctattctttatacttcctataaattcaagaaacgctatctcagcgattccattttcaatgcttatccttattggatagcccattattatgtagattccgtgcgttatgagggcaagtggcacttttggcagcacacggatgtaggcactgtgcccggtattgaagaagaggtggatttgaacgtctttaatggtacaatggaggaacttttggagcttacgttgaaaactccttgtatagaacgctaaaggtcaactttagcttcctgatattgacctttagctttttagtattgacctttattatttttggaatttcactgctgcccaccggttcttctcacgatggtggacaaagtgcagcccgttgcgttcggcttcttcgcggatgacgggaatgtcatctatgtagaaaccgctcatcaacaattccgctccgggattcatgcgggctatgtagtgcttcatatctgccaggaggatattgcggttgatgttggcgataaccatatcaaaaggacctttgctttccagagaggaggcatcgccttgggatacggcaatattgtccactccattcaattctatattttcgagggagttgcgcacacaccattcatctatgtcgatagctgtacaaggggaggctccacgcatgcgtgccagtatggcaaggatggaagtcccacaacccatatcgagcaatgctttgccttgcaggtcactatccagcagttcgcctatgatgaggcttgttgtctcgtggtgccctgtgccgaatgccatttgcggattgatgacgatgtcatattctgcttgtgggacatcgttgtgaaaagtgctgtgaatgacacaacggtctccgataacgatgggctggaagaagttcttctcccattcctcgttccagtctttgtcttcggcttctacgaaattatattctatctgtgtatcgggcagagggaagtctgcaagtgcttctttgagtagagattcgttatacagctctttctgtatataggcagtgataccgtcggtctgctcaacaaaactttcaaagccagcttcacccaagactccggaaagtacatcgttgactatttctgtgcacggaacagtgcggaatgtaaattctaaatatttcatcggaatatgattgtttgttaaatgcagaagaagattttaaagaacaaatctatttctgcgtatctttgttttcacactgcaaaggtaatgtaaaccgagggcagaataaaatgaacttgttcattttttatgcggaagtgccgcttgcctcgtcaaaaggcggggtatttagggaattccctataaatctttggggaaaatctgctgcatgggataaaatccggcgttatctttgtgacgtgaagaaatagataaacgtaaaatccataaaccaaactaatatgaaaaagattgtttttttatcgctttttgccttgtgcctcccatggacactggtggcacaaagtatagatgacgacctttactacactccttccaagaataaggaagagaaaaaagaagaggtgaagcaggagaagaaagtcgctgctcccgtagaagagattgtagtaaagtcgaatgtaccgaccactgtctattcatcgccgggaagcactactgttgtagtaaaagaccgtaagggaaacacccgcgatgtggacgaatataaccgccgttatgactcccgcgacaatgatttcgtgatggagaacgataccctttacatcaatgaaaaagaagatgacggcctggacggcgaatgggtgaacggtgaatttgaaggttcgcaggatgattacgagtatgctacccgtatcatccgtttccgtaatccccgttatgccatcagcatcagcagcccgctatattgggatgtggtctatggcttgaattcctgggattggaacgtgtataccgacggattatatgcatatgctttccctacattcaccaaccgcttgtggtgggattggcgctataactcttatggttggggcggctatccttactatggctggggatggaacagctggtacggtccgagctggagctttggctggggcggctggtacggcggtggctggtggggacatcatcatcaccatcactatcatcccggatattatcccggtggcggtggtcattggggaggcggccattggggaaatgcatataccaatagacgttcttatggtccgagccgttcttcttatgccggaaacagagtatcgtcctctacttcccgccgttcttctactgtaaatggagggcagactgtacgtcgtagcagtactacttccggtcaagtgagacgtagcagtaccggtacgtcaacccgtcgggtggtaggcacaagaagttcgtctacagttcgttcaagttcttctgcaactcgctcaagtgtaaaccgttcgagtgcggcttctacccgccgttccacttacacccgtccaagcagtacgcgtagtagctcatataatagtagcgtagaaggagttcgtagcagtcgttcttccggtgtacgctcttctgttggaacttccactcgtagcaggacttcatcgacttataacagaggttcaagcgccgcaccggcacgcagctactccaatgacaacaatcgtagcagcaatcgttcatattctgctccagtacgttcatccagtagcacccgttcttcttccagcttctcttcaggcagtagctcacgttccagttactccagtggtggtggcggtggtgccagtcgttccagtggcggcggtggttccagaagacggtaagtataagtatgttttaatctaacaagactaagaattatgaagaagataaccatgatagcccttgctatgtttacagctgtaggcgcaggggcacagacaatatatgatgcaacgaatattgcacagaaggaattgaatggaaccgcccgttttgtcggaatgggcggagctatgggagcattgggtggtgatatttctaccataggaaccaatcctgccggtatcggtatttatcgtagcaatgatgctatgcttacctttggctattcaatgacgggcacagaaagcaattatgtaggtaataaatttgaaacgaacaagaaccgctggagttttgataatgccggttttgtgatagcttcgaagataggcaatcatactcctttgcggtatgtgaattttggttttaattaccacaaatcaaagtcattctataagaatatgacgatgcagggggtgatgggaagcatagataatcaatatgtatctcaagtgcggagtatggcgcagcaggctacggatgcagcttatgcgttctatcatcgtcctcaatatgattacccggatcaaggagcttatttggactatggtcgcaaggatatttatcaacataattatgctggatggctggggactatggggtatcaaggtgcacttgttcttgaggatatagaaagtgaggactataatacttatcttccttatattccttccgaagcggatgcttatttcttgtcgcgtgagcgtggcggtattgaccaatatgatttcaatatctccttcaatataaatgaccgtttttactttggtgttactctgggtgcttacgatgtggattacaacaaatattctctctataatgaaatgtatgcctacaaatgggagggcgacgggcagatttatgaggaaggctactctttggagagctttaaccgtatacacggttcgggtttcgacttcaaattcggtgccatcttccggccgattgaggattctccgcttcgtataggtttggctgtgcatactcctacttattacaaactgacttatactacgggagcgttgctgacttcggatttgtttttaccgaatgaggctggggatgaaactcttactcgtaccactgtggatacttattctgcattaggcggtagagatatggaccgtgattttaagctgcaaaccccgtgggtatttaatgcaagtttgggctatacagtcggtaataatctggctttgggagctgaatatgaatatgaggactactcaagcatgaagttcaaatatcctgaaggtgacgagatggcatgggaaacgggtgaggctgacctctgtatgaagggggtaagtacgcttcgtttaggagcagaatacaagccgatacctgctttctctctgcgtgccggttacaattacagtactgcagcctataaaaaggatgctattaaggcattgccttccaattctataaatacagatacggattttgccaatagcaaatcgatgaatactttcactttaggtatcggttatcgcttttcttcgttttatgcggatttggcttataaattcgatacttataaatctgatttctatccgttttataatgatataaacggcttggtaacaccgccaacaacggaagttaccaacactcgcagtaaagtgctatttacattgggcatgcgtttttagaagaacaattttcattgcagataacctttcattgtcaataccttagggtataaaagaactccccggaatgtacaaatacatttcggggagtcttgtgttataggggagggattacagataccatgccacgccaaatgaatagggagatacttccggtcccttgtctttctggaataatccgtatgtggagtagcgcaggtaaatgccgatattaccataaccggcttgtgccagcaggtttatgccgacgggctgcacatacatacctttgcctacggttttcttcttgcctccgttgatgtgtgagaatgacttcacgctgtgacgtatctcaaattcgggaccggcattgaagaacactttgtttcttcccactctttgctgccattccatcaatacgggtacacggaagaagaaatggcgcagacggcttttattgtaactggtgtcttcgttgcctgcggtgaagatgctggttccgttttccttcagcaaggcatagttaccgtcgatattgaaagaacggtatccccagctgactcccaggttgattccccaatgcgggttcttcttgaagttgtgatatacggagaggatgttgaagccgaattcccatgacttggataagtcgagtcccatcttgtcgcttgctccgaaggaaaggaagtcgttagccagccggctgtagccaatatacagaccggaacagtgcggttcgtaagcattgtatcttctctttttggggatgaatggcagggcgtcgaggaaagtgcgcttgtctgcatccactttctcgagatagactccttcataaatttgtacttctttcttttctccgtcttccaactgctcttcgtacaccttgatgcgcatgtctccttttcctttccggatgatgatggagtcgccttgtgtctgtactgtagctttctgttcagggtcagtctgttgttgtgctgccatgcggccggccggcacagcaagcaggcaggccaaaatcataattctggttttcatatcgtatattgtttttagtgttattccgatttgtaaagcatatccatcatttccttttcactgagcagaccctctatgtaaatcaaagtgcccatggagtcttttcctatcttgaaaatgatgtagcggttcagcttctttccattgcgttccacctctttcagttggtaataagcgctgcgcagcacaccgctttccattacctcctgcgccttctttgcgttatcttgcttgtcgtgtacaatggcctgctgaatttcccggcgatagggggatacattcttgaacacaaggctcttgtaggtagtcatgcggtaagatttcaggatactgccgttcagttctaccctggtcacgtccttttgctcgccatacttgctgaataggtcggctatttgcagtctctcttgtgcatgtacaaaggctggcaggcaaatcagcagggaaaagaggcacagactacgtatgcaaatcagtatagatgttttcataaccttgttatattagtgttgaaacagtaagttgcttaaatcttcatccgtgaagctggcgttctgcagggcttctagtgctttggcttccaccagtttctcgtctgtataccgctggccgtcgatgacgacataattttcgggaacaccggaaagcggaaatataatcttagctaccccgagaagcaggagcaatccggcggcaatgccgctgacagcatagaatgtgcgatagaggcgggaaggctttcgctgtgtgggtacttcctttgccgattctgttgttacggatttttcctctgtcggttctgccattgaagttgcttcccggttcagataagcgaatagcgggcggtacgtttgcaggtgctccggcacttcctcttcggtaaagaaacggcgcagttcacgctcttcttcgcaggaagtttccccttcgaaatatttatccagcagttcatctatcttcatggctcatttctcctttcttttctttcttgtatggttcgcaggtaaacgtctctcactttcttccgggctcttgacagattgctgcggatggcttccggtccgcatcccgtgatttcggcgatttcgtccgtttcgtatccttcgatgtccttcatccgcatgatggtgcgttgaagattgggcagcgagtcgatgatttcgtgcatcagacggatttcatctttgatttccaacagccgttccggtgttccggtgggggatgccgcctgcactatgtcgagagatagggtgtcgttgcgtttgcagcgccacatatctatacagatgttgtgcgtcaacgtcatggcaaatgcttcgatgctccggtattgctccagttcaagccttttgttccatagcttgagcagtacctcctggacggcatcttctgcatcctccggttcgtcggtcaacttccgtgcatagttcaacagcttggcacggagtggaagaacggttattttgaattctttgagttccatttacacagataagacgaatgggaaatacaaacgtgacattgtaaagtgaaaaaagttggaataaaaaaagggacttactaacattagcagtcccttttcttcacattactataaaagtataggattatttcttgaaatagcggttgtacagaccttcgaaacctttaccgtgacgggcttcgtccttagccatttcgtgaacggtatcatggatagcgtcgaggttcaatgctttggcacgggtagcgatacgcttcttgtcttcgcatgcacctgattctgcgttcattctcttttcgaggtttgtcttggtgtcccatacgcagtcacccagcagttcagcgaatttagcagcgtgttctgcttcttcccaagcgtaacgcttgaaagcttctgcaacttcaggatagccttcacggtctgcctggcggctcattgccaagtacataccaacttctgtacattcgcccatgaagtggttgttcaggtctttaatcatttcgtcgtcgcaacctttggctacgccgattacgtgttcgtcggcaaataccagcgggccgtcagctgttgcttcttcaacttctacgaacttgcttgcgggagctttacacaatgggcacttttcgggagctgcatctccttcgtatacgtaaccgcatacagtacatctaaattttttcattttctctcagattttaattagttgaattagttattctttgttgttcttaaacgttcttcttctatgcaatgtttacagattcctttataatagtagtggatttcctgcacatcgtgcccgtccatatccatgtcgaccaccttcttgacgttgttattgcacatcaagtcataaatctttccgcaacgcttgcacaagaaatggccgtgcgggctggtatcggcatcataacatgtgttacgctcgtcgatagtcagggtttgtgcggcaccttgctcgctcagtagtttcaaggtattgtataccgttgttttagacagtgtcggtatggagggagacagtgccgtatagatttcatccaccgtgggatgcgtacgatgctctatcaagtaattcatgatggctatgcgctgtactgaaggcttgatattatgattctgcaatcgttttactacatccatataatctaaagtttcaaacttgtaattattacatttttaattcacttgcaaagataggaagttcctataattctccaaaagatttttggaaaatttttagttgcggtcattaaaattgtttatatatgttcctcttcttgtaggcaggttgccgtatttttgccataaaagcgaaggcaggatgcacccggcttcagtcggtttctcgtgccgatatagagaaaacgtttttctcttatctctcttaatcagaattttgccgtatctttgcaccgaataaataatatagcatccttatgaattacggatatgtaaaagtagcggcggctgtgccccgtgtcaaggtggctgactgtaagttcaatgcctcagagattgaaaaagagattattatagccgacgggaaaggtgtgcaaatcattgctttccccgagttgtgcattatcggatatacctgtggcgacctctttgcccaacaacttctgctcgaagaggcagaaatgggattgatacagattctgaacaatacgcgccagatggatattatctcgatattgggcatgcccgtcgcactgaacggcgtgttgctgaatgcggcggttgtcattcagaaggggagagtgctgggcgttgtcccgaagacttatcttcccaattataaggagttttatgagaagcgctggtttacttccgcatgtgatgtggcagaaaacagtgtgcgcctttgcgggcagattattccgatggggagagacctgctgttcgaaacggcggataccactttcggagtggagatatgcgaggacttgtgggcacccataccgcccagctccacgctggcgctgcaaggtgcggaaatcttgttcaatctttcggccgacaatgaaggtatcggcaagcacaattatctgcgctcgctcatcagccagcagtcggcacgatgcattgccggttatgtattcagctcatgcggtttcggagaatccactacggatgtggtgtttgccggcaacggactgatttatgagaacgggactctgctggcggcaaacgaacgcttctctttcgaagggcaggtggtcatcagtgaaattgatgtggaacacttgcgtacggagcgccgggtgaatacgaccttcgcggcttgccatgcaaattgtgtttcggcccttccggtacgaatctctacggagtatgtcaacagcagggatttgaacctaacacgtacttttgaaccgcatccatttgttccgcaggggatagcgttggacgaacgctgtgaggaggtattctccatccaggtgtccggactggcgcaacgtctggtgcatactaaagcgaagagtgccgttatcggcatttcgggtggactggattctacgctggcgctgctggtttgcgtaaagactttcgataagttgggatggtcccgccagggtattgtcggtgtcaccatgccgggattcggaacgaccgaccgtacttacacgaatgccatcgacctgatgaactccctcggtgtgactgtccgcgaagtcagtatcaaggaggcctgcatacagcatttcaaagacatagaccatgatgtccatgtgcacgacgtggtttacgagaatgcgcaggcacgggagcgtacccaaatcttgatggatattgccaaccagacctggggaatggttatcggtacgggcgacctttcggaacttgctttaggatgggccacttacaacggcgatcacatgtcgatgtacggtgtgaatgccagcgtccccaagactctggtgaagcacttggtgaaatgggtggcagagcatgatatggacgatgcttcacgtgctaccttgctcgatattgtggatactcccatcagcccggaactgattccggcagatgagaacggtaatatccagcagattaccgaggatttggtggggccgtatgagcttcacgacttcttcctttattacttcctgcgctgcggtttccgtccttccaagatatttttcctggcagcacgcacattcaaggggatgtatgatgaagaaaccatcaaaaaatggttgcagactttctgccgtcgtttcttcaaccagcagttcaagcgttcctgtttgccggatggtccgaaggtgggcagtatctctctgagcccgcgcggcgattggaggatgccgagcgatgcttcgtcggagatgtggctaagggaggtggaaggactctaattctttacttcgggtatgccgtaatatcgatatgggtatttgatgactgcatcttgtttgcattcttgctgcatgtgttttgcagtgcgactgcaaacgtgttgcagtatcactgcataactgttgcagtcgtactgcatatcggtgtgcagcgccactgcaacggctttgcagtatcactgcaaaatgtatgcagaattttgcagtaataagctgttgattaataagtagttgtaaaagtagggatatgctgcgtgtatggaaaagtgcagcttagtttcgtttcccgtagtatcgtttgtagattttcttgtattcctttccctttttgaaactatccagccatgtgttgaggctgtccagcaggataggggactgtttgcttaccccccaggaatagaattgcgtgaagctgatggcggtattgatgtctatttgaggaatactgtcggctgcggtacgggcaatgctttcgtcgcatacggcatagtcgatgtctccgtgggctaccaaggcaatcagttgttcgggaccgtacttttctatctcctcaacgtagatggtgtcgcctatttcatttcccaggttgcggatgcgtagtatggaaggggagcctttcactacgtgcagtgtcttgcccgccaggtccagttggcttttgatgaacagtgatgagtcgggaacattctcgagcttgcgctgcaccagcacttgcttgttcaatacgatgggggtggtaagcagtaaggagtctttcagctcgctggtggcaaggatgccgtaggcaatcacgtcatatttcccatcggccaggccttccagccgcttgttgaagctcatttccggtgatatggcagcctgcagtccgtggtcgcgtgcaaaagcttctatcagctcgtagtggaaaccggacaaggtgtcatcatccacatagaagctgatggagttgtattccgtcgaagcatgtatgatgccttcggcagctatttcggcatagtcgcgcggatgacctttcggcttttcttctttcttgatgagatagtgggctatgagagccgctgtaatccccagaaatgcgtatttgagcagtctgcttttcgtcatacgcccatctgttagtcatagaagttccatgagacaccaatcttgaacaggcgcggattgatggggtagtgcggcaccaggaaggaattggcacttcccatacctgcgttgacatgatacatcatggcaaagatacgcgtccgcttcaagtgcaggttggcatatacgtttacgatggggtaaccgcctatttccaccaagtcgtccgtaggttgcagatggaattgctggacgccgggtgcataggcgggtgcgttgtacttggtgaagtaacggacatcggcacccaactgaacggtcagcaccttcttggcgagtttggccagtatgtagaagttatggtagagcgagagttggggcaatggaagtactgtttcattgctcgtcttctgccaggtcacttcgttgtccaggtggaagataccgaggcggaagtcttgtttcagcgtagcagacagcacttgtatgttgcctccgttctgttcgggcagggcgctttggttgaagtaggtgtagttcttgatattctctacaccggcacggagattggttccccaacgagaaatgttcagttcgccttccacacgcgtgcggaattctttgtccatgttgtcattgtcccagttgtagtggttggagtgataatggcgcatatagaaggaaggaagcgtgttgctcacataaccgcgggcgtagaagttcaccgtatctttccatagacggaagttcaggtccagattggcgttgacacggaactgcccgatggctttgtctaccaagcccacttcaccgtttacgttgtagtgtagcagtttgccttcgcgcttggcgagttcgccacccagaaagatttcctgctcggtgtagcggatgcggcgcatgtcggtaagcgtgtccgtgttcatcaggtcgtaccggctaaacttgtgggagatataagccgtaagtccggctttggcatatttgttgaagccctccagcaaggctattccgaacacgttctttacactgaatgcagtggtagagtcgttactgtaattcttgtaaagtttgtagtcttccgggaagaatccttcgggctcgcttcccgaacggaattggtgccgcgaccgttctactttcagggtatggataaagctggtgacggggacgaactcttcttcgaaaagtgagtcgttgtctgcggtagaaacagacggcaagctgtcattgacggctgcaagtgtgccgaccgattttgatgctatgctgtcgtttggcaatgctatgtcgttgttcgaagcggatattttggcttcggaggacggggaggaagaagcttggggtgcggattccgtcggtttgccttcctgtgtgctccgtactttccgcgtaaaaccaagacgatagcgctgtgtcagatagatataaaaatccttgttgcggttggaactccgttccaatttgaccggtatagtggtggattcatactctttctttcctccagacatgttttcgggacgggtgatatattggtcgtctgcaataccgccgttttcgttcattttcaggaagaaattgttgtagactgcttgtacctgatatttttcaccgatatagctaccgaacagacctgcattgaagtgcgaggtggactggttctggtaataaccgcgcccgtacagatagtcgatgttaaagccaaatgccagctgtttgttgacgttgacggagaagtaggacttgaagcgttcttcaccgttcactttgttgccggccttgtagtaggtaagattggtgtaaggcacgttgctgttagtgaaaagcacctggtcgggacgtatgaaaaaactcgaaaagggagccatgaagatggtgggttcgctttcctctcgttcgaagaacagacgtgagaggcgtggagaacctaaattccccaagtaattgtagtggccgaacattccttccaccagattggtgctctggaagttgaggctggctgtatcggcaggtatgatggtacggttgcctagtgtctcacttagtttccacatgtaaagctttggcggaagactttgaatctcagtattggtactgtcttccagattgtccggctgggtattcgggtcaatctggttaccgaaccggtcgcgattgttcattgggtttaaggtgttttgcgccatagccccccatatccctataacggacagaaatatatatgtcagtacaattcgtctcataattaggcgcaaagatacaataaaaaattatttgcttactgaattcagccttttttgcttcttttaaaatgtcttgttttctgttttgccctatactgcttccggttctctgcccttgaatccatgctttgggggcttgaaatgaaataagcccttgcaataaatcaatatcacaagggcttatccgctttcctttatctcttattctggcgtaaagtttctcctcttatgggggagtggctttacacagcctttcatttcatttcctgaataagttccattcctttcttgatagcttcttcgttcatcggtatcaagtgatggtggcgttcgggcagtgtcttcttcaatcctctgagtacactgtccagtgtaaccatcggcttgattttcaataatccacccaatacaatcatgttgaacgccttggcattgttcatttcattggcggcatccatggcgttgatgcggtaaacgtggatgtccttgcgcgtcggcgggttgatgatgccgtaaccgtcgtagatgagtacgcctccgggttttaccttgctttcgaatttctccagtgacggctggttcaggatgatggcagcatcgtacttgctcaagatgggtgaggatattttctcgtcactcacgatgactgttacgttggctgtaccaccacgttgttccggtccgtaagccggcatccaagtcacctctttgccttccatcaatccggaatatgccaaaatctttcccatggacaatacaccttgtccaccgaagcctgctataatgatttcttctttcattgttcttctgtctttagcatgattatttatctttcaggtcgcccagcggatagaaggggaacatgttctctaccatccattcattggatttcgcaggagacatcttccagccggagttacaggtggagacgatttccacaaggttggaacctttgcctgccatagagttctcgaatgctttgcggatggcctttttcgctttgcggatggcaggaacagactgtacgctttggcgtgtcacataagcggtgccttccagttgtgcagcaatatcggccatcttcagcggatagccgtgcagatgcacgtcgcgtccgtaggggcaggtagcagtcttcatgcctacaagggtagtgggagccatttgtcccccggtcataccatagatggcattgttgatgaagatgatggtgatgttttcaccgcggttcaaggcgtggatggtttcggcagtaccgatacaagccaagtcgccgtctccttggtaagtgaacaccaggcggtccggccaaaggcgcttgatggcagtggcaagtgcgggcgcacgtccgtgggcggcttcctgccagtcgatgtctatataattatagatgaacacggcacatcccacgggggagatacctattgctttgtcttccagtcccatttcttcgataacctcggctacgagtttatgaactacgccgtggctgcatcccgggcagtagtgcatgggattgtcgttcatcagagtcggtttcttggcaaccagattctcgggctttataatatcttcttttgtcataatcacttctccttatctgttggtgaaccgtatgaaaaactccatcagcttgacgaatatcgccgcgccgcagacgtagatgaacagcttgaagtcatcttttgcagcaaaatatataatgatagctgctagggcgagtaccatgaagagaatgttcagtacgtttcttattttatcaggattcatttcttaatcagtttttctttcaatgcatctactatctcatccggatcgggaacaatgccgccgagacgtccgaaatgttccactttcactttaccgttcacggcaaggcggacatcttctaccatctgtccggcattcaattctgtaacgagcatgcctttcaccttgtcggcgtacgcggcaatggctttggtcgggaacggccacaacgtgatggggcggagcatacctaccttgattccttcttcgcgcgccagctccattgctttctgtccgatgcgtgccatggagccgaaggctacaatcaggtagtcggcatcatcgcaatgaatttcctcgaagcgaacctcattctcttctatctgcttgtatttggcctggaaacggatgttgttcttttccatttcttccggtttcagttccaatgaggtgatgatgttgggcttgcggccgttggttctgccggtagtggcccatgggcattgttcgatgacttccgcatcggtgcggcgtggcttttgtgccgggagcaccactttttccatcatctggccgatgacaccgtcggcaaggatgattgccgggttgcggtatttgaaggcaagttcgaatgccagtcctacgaaatctgccatttcctgtacggaagccggagcaagggcaatcagacgatagtcaccgtggccgcctccttttactgtctggaaatagtcggcctggctcggttggatggttcccagaccgggaccgccgcgcataacgtttacaatcaagcaaggcagctcggcacctgccagataagagataccttcctgcttcaggctgacaccggggctggaggaggaggtcatgaccattttaccacttccggcaccgccgtacaccatattgatagctgccacttcactttctgcctgaagaaccaccatgccggtcgtttcccaaggtttcagttcggcaagagtttccaatacctccgattgcggagtaatgggatatccgaagtatccgtctgcaccgcaacggatggctgcgtgggcgatggcttcgtttcctttcattaatacaacttcttctgccatattctactgatttacagatttattctacttttattttatatactgagatacatccgtccggacatactgtggcgcacgaggcgcagccgttacaagtatcttccaatatctggtgggcatagttataccctttcacattcacctccttggtgagggctattacgttgagcggacatgctaccacacacaagttgcagcctttgcaacgttcggtgtctactacgattgctcctttgatttttgccataatttacgttctttatttattgattgtacatatccttgttgtagaagttcaggatgtccatagccatttgataggcatgctgtgccgggctttcggggttcaggtcgatggcatactgatagttgttcagcgcttgttgccagttgccttgtttccgataggcatttccccgcaggtagtaagcttcgtctttgccgggaaagtctgtttgcagtatttcgtcaagctgctgaatggcttgttctacatttccctggttgataagctcttttatggtattcagtcgttccatatctaaaaaatatccgggttatcgaaccacaaagatagtttttatttgaagataatgagcatcttcattgtgaaaaataagaaaaaggggcaaataaaaagcccgaagtttctcacgattctatcagaatgtcagaacttcgggcagatatcataaagaatatggttctactgctttacaagtgtaccggtatcttgtccactcttcgttggtggcgtccgccttcgaatggtgtactgaagaattccttcataatcatgtcggcttcttcggtactgatgaatcgccctggcatgacgagtacattggcatcgttgtgctggcgtgccaaatgggctatttctgccgtccagcagagagcggcgcggataccctgatgcttgttcagcgtcatactgataccttcaccgcttccgcagatggcaattcccggatagcactctccggcttcaacggccagtgccaacggatgtgcaaagtcgggatagtcgcaactctcggttgagtaggtcccgaagtccttgtaagcccagcctttggcttccaaccagccgcggacatattccttcaattcgaagcctgcatggtcggaacagattcctattgttttcatgatggtcagttaatataccgatgtgtcaatgtgctgatgcctgcagttgtggggcgcgggcaatcagcacatcagcacatcggataatgattataacattgcttttacttgcttgtaaacgttctctgcggtgaaaccgagcttttcgtccagcactttataaggtgccgagaatccgaatgattccaatccccatactttaccgcggggacctaccagcccttgcagtgtgacgggcagaccggctgtcaggccgaataccttggcaccacacgggataatgccttcctgatatcccggagcttggctacggaacaggccttcggaagggacggacacgatacgcaccttgatggcatccttgcgcagcaattcagcgccggctaccaatgtggcaacttccgagcctgaagcaacgaggattacattcggattttcatcggagccggctacgatataagcgcctttggcagcttgttcgtaatcgttgccttcgggcaggttggcgatgttctggcgggagaaaatcaaaccggttggggttttggtattttccattgccagcttccatgctacagttgtttcttctgcatctgccgggcggagcaccaacatggaattgtgtcccttgtggtttttcagcttttccatcaggcggatttgagcttcctgttctaccggttcgtgggtagggccgtcttcacctacacggaaagcatcgtgcgtccagatgaacttcacgggaacttccatcagggctgccatacgtatggcaggtttcatgtagtctgagaatacgaagaatgttccgcaagcggggattacaccgccgtgcagtgccataccgatacagcagcaagccatagtcagctcggcaacaccggcctggaagaatgcaccgctgaagtcacctttcttgaaggcatgtgttttcttgaggaatccgtctgtcttgtcggaattggaaaggtcggcagaagcaacaatcatattttctacttgagtggcgagagcaccgagtacagtggcggatgctgcgcgggtggcaacgcctgctttctgttcgatggcggcccaattcacttcgggagtcttgccggagaagaacatttccagtttggcagccttttccggattggcttttgcccatgcggctttggctgcatatttttcagtcatgattttcttcagctcagctgcacgcttggcatatagttcggccacttcggggaagatgacaaacggatttgtcgggtcaccacctaaattcttgatggtgtttacataagcgtcgccgcccagaggagcaccgtgtgtggcacaatcggcctcgtagctgctgccgtctgccttgcgggcacctttacccattacggtatggccgataatcagcgtcggacgctctttctcagctttggcttcgttcagtgcaccgcggatggcatcgggatcgttaccattgattttaatgactttccagccccaagcttcgtatttcttgccggtatcttcgatggtcacatcctttgtttcggtagaaagctgaatgtcgttagcatcatagaacatgatgagattatccaaccctaatgctccggcgatacggcctgagccttgggagatttcttcctggatgccaccgtccgagatgtaggcgtagatggtctgtggcatcacttcctcgaaacgtgccttcatgaacttggctgcaatggctgcaccgacagcaaaggtgtgtccctggccgagcggaccggaagtgttttcgatgccgcgcatgatgtcacgttcgggatgtcccggagtggggcttccccattggcggaactctttcagttcgtccagcgtgaacttgccggtcagggccaatgtagagtaaagcatcggtgacatgtgtcccgggtcaaggaagaaacggtcacgaccttcccaagccggattttcagggtcatataccaggaactctgagaagagtacatttacaaagtcagcaccacccatggcaccgcccggatgcccggagttggctttctcaaccatggatgcagcaaggatacggatattgtccgccgcacggttcataagtttgttgtcgttcatattgaatctaattaattttgaatattatcaatggattattggggccttgtaggttttccaagggcaaagataactctttatgcgtaattcacaacactcgaagagtgtcttttttatcagtattactgcctttttgctgctaaaatgatactaaacgtatttagctgattttgtgcggtgcacggtagttttactgtaattcaatagtaacgattgatttggccggaagtttaatcttgagaatatctttattaatttttacctctttgaacggaacgggtttcacattgtcgggattttcaaatgaattgtagtccgtcagattggtggaagtcaatatttcaccaactgctttcttggctttcgttccagacagattgatggtcacttcctgtgcattgtctgcatctacgttggacatggaaatgtgtatcttgccgttttgatctttggaggcggtagcactgaccattggtattctgcggttgtcgcgtacatccatcatgtcgcagttcagctcaagagggatgtacgtggcatcttggtgtacattgtacattttgaatacataataagtgggggtgagtaccatgttttttccgctggtcagaatcatggattgcaatacattgacgatttgggcaatgtttgccattttcagacggtcggtatatttatggaagatgtcgaagctgagggaggcgacaaaagcatcacgcaatgtattctgctggtacagatgtccgggattggtacccggttcagtgtcccaccaggttccccattcgtcaagcataagagccacgttcttttgagggtcgtatttatccataatggtgcaatgcttcttgatgacatcttctatttcgcggcatttgcccagtgtccagtaataatcgtctttactgaatcgggtggcggcgcctttactgccgttccatccgctgacggtatagtagtgcaaggaaagaccgtgcatacggccgcctacgcggtccatcagcactttggtccagttatagtcgtagtcgctggcaccgctggctatcttgaaaaggctattgccgtcatagttgcggcagtaggtggaatagcggcggtagaggtcggcataatattcgggacgcatgcttccaccgcaaccccagctttcgttacccacgccgaggtattttactttccaggctttgtcgcgaccgttctggcggcgcaggcgtgccatgggggagtctccttcggaggtcatgtattccacccatttggcaagttcttctacggtaccactgcctacgtttccactgatatagggttcacatcccagcatttcgcagagattgaggaactcatgggttccgaaactgttgtcttcgatagtgcctccccagttgttgttcaccattttggggcggttttctttagggccgataccgtccatccagtggtattcatcggcaaagcagcctcctggccagcgaaggacgggtacacggagctcctttagtgcattgaatacgtcggtgcgataaccgttgatgttgggaatatcggagttttcacctacccaaagtccaccatagatacaagttcccaaatgctctgcaaattggccgtagatttctttgggaatgatttgctcgctctggtctgtgtgtaaagtaatagtggcacttttctgtgcgaagagtgacaacgaggtggagagaaatatgctactgataaataactttgtgttcatagttttttagtgttattaaatacttagttcttgaatcttactgctgcttcttcgatgggcaaaccagctttatagctttcgatataggtgttgaatccgcttacatcttcggctgtcggtgagatttcaataccggcatttccggtgaatacatgcttgtccaggaagtcggcaagggattggtcgtttccgttgtttgcaaggtaggaagcgaggagggcaataccccaggcaccaccttcgccggctgtttccataacggaaatgggtgaattgatggcagctgccagtattctctggcctactcctttggttttgaagagtcctccgtgaccggtgattctgtctactctgattttctcttcattgaaaaggatgtcgttgccgattttgagaactcccactgaagcatacagatgggtgcgcatgaagttggcaaggttgaacttgtcgtttgccgaacgtacaaacagtggacgtccgtctgccagtcccgttataggttcgcctgatatgtagttgtatgagatgaggcctccgcagtctgcattgcctgtcagggcgtggttatagagctttccgtagatttcgtccatatctacggggatacccatcagttcctggtattctttgaaaatattgatccaggcattgaggtcggaagtgcagttgttgcaatgcaccatagctacgaggcttccgtcgggggtggttaccatgtcaatcatttcgtagggcttggacaattctttctccaatacaatcattgagaaagaggaggtgcctgccgatacgtttccagtgcgctgctttacggcgttggtggcaaccatgccggttcctgcgtcaccttcgggcggacagacgggaattcctgctttcagatgtcctgatatgtcgaggcgaccggctccttcgggagtaaggaagcctgcgttttcaccggccgacaataccttcggcagaatatcccgaagcttccagtcgtatcctttcggagcaataagtctgtcgaacttatccaccatttcagaagaatagtttttggtgatgggatcgatggggagcataccggaggcatctcctatgcccagtaccttttgaccggttatttgccagtggacaaaacctgcaagggtggtcaggtaattgatggatggaacgtgttcttcattatccaggatggcttggtagaggtgggaaatgctccaacgcagagggatgttgtagacaaataattcggatagggctgcggcagcctggccggtattggtatttctccaggtacgaaagggtacaaggatttcttctttttcgttgaatgccatatagccgtgcatcatggcactgacaccgatggctgccagggtttctatctctgtatcgtaaaggctctttacattagcacgaaggtctgcgtagcaatcctgcaacccataccagacagcttcgacgctatatgtccacagtccgtcgactaactgattctcccaagtatggcttccctgggcgatgggtttgttttcctggtcaatcaaaaccgccttgattcgtgtggaaccgagttctatgccaaggatggccttacctgcctcaatggttgattttgcatctaatttcatggtattaatgataaattacggatttatagtacgattataaactacggattactgattgcaaactactggttacgtttgtggtacgcgtaattagtaatccgtaatcggtaatccgtaatgattatcagcaaagtgccttgttcagcatatagtagacttcattcatgcgcagttcttttttgaactcgctgatggtggtattttcatcgatgaccaccatttcgatgccggccatttcggcaaagtcttcccaatattccaccgtcaggtcgtaggagaagctggtatgatgtgtacctccggccagaatccaggctgcagcgcccacctcgaggttgggcattggaatccacagtgcgctggcaacgggcaacttgggcagaggcttgctcttgatgcattctactttgttcacaatgaggcggaagcgattgcccaggtctacgatggtagcggctacaccttcaccttgcttgctggtaaataccaggcgggctgtttcgctgtcgataccgatgctcagacggtgcacttccagtttcggcttctgttcggcaatcagtggacagacttccaacatgtgtgcctgcaggatggcgctcttttctccgtcgaagttcagcgtatagtcttcgaggaaggagcaccccttcggcatgccttgactcatcacccaagtggtacggtatagtgccgcagttttccagtcgccttcggcaccgaagccgtaaccttccgccatcagtcgctgtgaggccagtccggggatttggtcaaagtcgcccaaatcgttgaagttggtggtgaagcctttggcacccgtgtctttcagcacgcggcgaatggcgatttcggccttggcggagttccatactttggtgtaggcttccgtacgtgcgtcttccagttcgggagcgtggtcgtagagcttgaagtattctgctacgagtgccttcacgtcctcgtcgctgacagcattgtagtatgtcatcacatcattgatgggatagtagtccacatgatagcccaatacttgttcggcgctgaccttgtcaccgtctgtcacagccacgttgttcatctggtcgccgaagcggatgatgagcatatcctgcgcatcagcccatgcggcagctacgcgcatccatgcggcaatctggttttgggctttttcgtcctgccagtggcctactaccactttgcggttctttcgcatacgtgtcacgatgtgtccaaattcgcggtcgccgtgagccgattggtttaggttcataaaatccatgtccatcgtctcccagggaatttccttgttgaactgtgtatggaagtgtagtaatggcttcttcagttcctgcaaaccgtgaatccacattttggcaggagagaaggtgtgcatccaggtgatgactccgatacacttatcgtcgttgttggcggctttgaaggtagcggttacttctttggatgaattgaccgtacctttatatactacctttacgggcagtttcccggaatcattcagacctttcaccatttcattactatgtgcgtctactgcgataactgcgtcacctccgtacaagagctgtgctccggttacgaaccatacttcatattgttcaaatgtgttcatacaatttatttttatagtttatatttaaagaatgatagttatttctgtccataataagcgttaggaccgtgcttgcggctgaaatgtttttctatcagcagcggattcatggtcagattggggttcacggcataggctatacttgccatttttgccacctgctccatcactacggcattatgtaccgcttcgtgtgcgtcttttccccacgagaaaggaccgtggttctttaccaatactccgggagtatgtaccgggttcagcccctcaaagcgttttacgatgacatttcccgtttccagttcatacgctccttccacttcctccttcgtcatgtctgctgtgcagggtatggcgtcgtggaagtaatcggcatgtgttgtcccgatattcggtatgtcacatccggcttgtgcccaggctgtggcgtaagtagagtgcgtgtgcaccacaccgccgatttcggggaatgctttatagagaaccaggtgggtcggtgtgtctgaagagggctttaaccgtccttccacgaccttgccgtcaagattcactaccaccatatcctctgccttcatttcatcgtaactcaccccactgggcttgatgactaccagaccagattcgcggtcaatgcccgatacattgccccatgtgaagataaccaatccgtgcttcaccagttcaaggttagcatggaatactttgtctttcagcgcttccagcatattatttaaattactaattacaagttgttgaatattaggttttcagagcttaaatttcggagctttgcggtatgccttctcattaaactgatataaagcagctccacgtttggaccccgttttgtctattttgtcagttttttctatatagtccatttctgctatgcgttttcggaagtttcgtttgtcaatgctctcgccgtatatagcttcgtataagctttgcagttgtgacagcgtgaacagtttaggtagtagattaaagccgattggttcggtggacgctttttgttgcatcaacttccgagctttctccaccatttgcggatgatcaaagattagcgctggcagttcattgatatttacccagaaagcattgtgttgctgtacggattctttgtcgtattcgttgatgttgatgagcgcatagtaagcaatggagactacgcgttctcctgggtcacgatctatggctccgaaagcttggacttgttccatatatacatcttccagtccggttagttcattcaggactcgtttggctgcatcatccacgctttcgtcttcctgcacgaatccacccatcagcgaccattcgcccattgccggttcaaagttacgcttcagcaacagcaggttcaattctccttcattgaaaccgaaaataatgcagtcgatacttacataaagtttcggatttgaactatagtaattactcatatcttaatttttgtttaaggggtatgctgcatggatatatatcatggcaacataccgatttaccagaaataccaataaaaagcagcagtaatacccaggatgataagggtatgaatgatatcccatttattccaactcgcacgtgtagctgctttttgttcaggagttgaagttccgaataccagcccttgaatcttttcagcgcttggggcagctgtaaacatgctgactgcgataaccactacgatgcagaacaagaacatccatccgcagaaaaacagccagttcatatcatagaacagatacttgaaggtactgcttgacacatctcctacattgctgtaatatacttttgcccccagacgggttaaaccgataatcattccggcaatcagtccccacataccgccttgtgcagaggtgcgtttccagcagatccccaagaggaaggctgcggcaatgcctggtgctaatacagattgtacatcttgtaagtaggtgtaaaggacatcgcctacactgcgcataatgggaatccagagtatacccaatatcacaatcgcaacagttgccatctgtccaattcctaccagctttttctcagaagtgttcggcttgaaacgtttgtagaagtcaatggtgaaaagcatagcagatgagttgaacaaagatgcgagagaactcatcaatgctgcaagaataccgcaaacaaccaaacctttgactcctgcaggaagtaattttgctactagagttgggaaagcagcatctgcattggcatttccgtttgccagcataggtagaaaaccttctcccccggttccgagatatttttggtgtaatgcgaaagcaatcatgcctgggataaggaataagaatacgggcaataatttcaggtaagctccgaagatggtaccgcgccgtgcttccttttcattctttccggaaagtacgcgttgcacgatgaactggtctgtacaccaataccagaatccgataatggctgaaccaatcagtgcacccaaccaagggaagttagggtcgttattactgcgtataagttctgtcattgtgttgccataatcgttcactgtggctgcaccgcagattctcatcatctcatcccagcctcccaattctttgaagccgagtaccaggattatcagtgaacctaacagcaagatgggggtctgcaggatggaggtataaagtaccgacttcattcctccgaagattgtgtagagcgcagtcagtataaccagaccgatggcggcaatccaaaagaagtcgatcccccaaagttcttttataccgaatacttgttggaataccaatcctcctgcataaaccgtcacggcaacttttgtcagtacatagctgattaaagatattacagacaatattgtacgtgattgtggattatagcggcgttctaggaattcaggcatcgtgaataccatgcttcgcgaatagaacggtacgaatacccagcctaagataaggatcatccaaccttgtatttcccaatgtgccatcgccataccgctggaagcaccggcaccggctagtccgattaaatgttcggaaccgatgttggatgcaaagatagatgcaccgatagcaagccatgtggcatcacgaccgcctaaaaaatagtctgctgagtcattctgtttctgtttgacaacccagacaataattccaattaaagccaggaaaaagattccaatgactagccaatctaatgtttccacgataataaatgatttataaggttactgttatttttctacggaaaatttgaagacacattcactgttgtaaatttgtccgggttccagtacgacagaaggccattgggctttgttggggctatccggataatgttgtgtctcgaggcatacggaagcgcgttggttgtaagtaatgccttttttaccttttacggtgccgtccaggaaattcccggtatatacttgtatgcctggctcattggtataaacttccagagtgatgccgcttataggcgatgtcagtttagctgccacttgggataggtcacctttagtattcagtacccaattatggtcatatccgtttccgttctttatttgttcaaagtccgtccggttgatgtcttgtgctacactcttgggagtggtaaagtccattggtgtttctttgacggagatgatgtcacccgttgtcatgaaagtactgtctaccggagtatagttgtctgcattgatgtataagatgtggtctgttgctgcctttgaaggatcaccagataaattgaagtaagaatggttagtcatattgatgaccgtcttttggtctgttgttgcactgtattttatatcaatggcattgtcatccgttaacttgaaaagtacttttgccgtaacgttgcccgggaaattctcgtctccatccggtgaaatgcgggtaagctccagagttgtgctgtcaatgggattggcattgtatacttggtactgccatcctttgggaccaccgtgcaggcaatgtccgaaattgttctgtgctaactgtatggtatctccgtcaagaacgattttcccttgattaatccggttggcgtagcggccgatagaagcaccaaagtcacttggaatgttgatgtaatcggcaatgctgtcaaagcccaatactacatcttgcatagctccgtttttgtcgggcaccataatggatacaatacgtcctccaaagtttgtgatgcatacttccatgcccgctttattcttcagcgtataaagatgtgtttgggcgtcattgaccgttgtttggaattttactggatcaagaccggacagcgtaagcgttgtttctgtcttttgattgcacgcagctagcatcattgcggcaattcctgcaagtagaacatgtcttttcatggttttgtatttaatgtaaatgagatgattatcttcttttggtgtaaaaataacacttttctttagtgtaggctgtacacttttatatgttatgcaacataagtgtcaaaaacatatctgtgtcaactggctgtatagataggcacgtccggaataaacttctcggatgatcttgtttttttagagtggaaaacggtggaataggggggaagaaaaaggcgcttcccattgctgggaaacgccttttatttgaatactgatgtctgttattctaatctgcgggcaccgtcgctgatgactacatcatatactttcgggcttctgccgaacttcttcttgaattcatcttttgctttttcgatgaatgtgctgtacaattcatcctttaccagattgattgtacatccaccgaatccaccgcccatgacacgtgaaccggtaactccacaatcgaatgcaaggtcattcagaaaatcgagttcttcgcagcttacttcgtacaacttactcatgccctgatgtgtttcatacatcttttggcctacagtttcatagtcgcctttttccagggcatcgcaaacgtcaagtacgcgttgaatctcttcgatgacatattctgcacgcatatagtcttctgcgctgatgtcggctttggcttcttccagcatgcccatggtaacgtcgcgcaggaactctacgtgtggatgcttcttctggacagcagcaacagcggcttcgcagctttgacggcgtttgttgtatgctgaagatgcaagttcgtgtttcactacagaatctacaagaaccagacgatagccttgcgggtcgaatgggaaatactgatattccagtgaacggcaatccaggcggatgaggcttcctttctttccgaatacggaagcaaattggtccataataccacagtttacgccacaatagttgtgttctgtagattgtcccacttttgccaattcaaatttgtctattttgttgtcaccgaacaagtcgttcaaagcataggcataggtactttccaaagctgctgaagaggacattcctgcacctaggggcacatcgcctgcaaaagcagtattgaagccttttacatctacaccgcgtttcatcatttcccggcacacgccaaagatatatcttgcccagcttgcgcggggtgcatcttcttcattcaaaccaaattccacataatctttcaggtcgatggaataagcttttactgtgtttgtgccgttgggttttatttctgcaatcattcctttgtcgattgctccggggaatacaaaaccaccgttatagtctgtatgctcaccgataaggttgatgcgacccggagaagcataaacagctcccgttgttccgtcaaagtgcttgatgaaacggcttcttacgtattctatatccatgatatttatattttataaggtgaataaataaattacctatattttcttgttaatcaaccttgatgtccttattaacatttttgcagcctaccaaaccgtagaacaacagatagccaagggctgcgatgataacccagtaactcggcatgaaacctgcaatgtcggccaccaaaccttggataacgggcaagataccgccgccgcataccaataccatgaacagaccggaagcggctgccagatatttacccaatccttctacggccagattaaagatgccaccccacatgatggaagtacacagacctaccagtaccagatacattgcattgataggtacttctgcaaatccgaaagagagacctcccgtagcgctttgttggagtactggcagattgacaagcgaaccggtagatgagaagatggcaaggaataccaaaagtaaacctaatgcggaagtaaaggtaagcattgccttactggagatttttgcacccaatgaagcaccggccagacgtccaatcagcatgaggaaccaatatgtacctacaacaaaaccggaaatagtggaagaaatgccggctcctcccttttcaatagggtcggttaagaacaaattcaaggtgcccggtacaccaacttcaacacctacatatacaaagattgctatagctcccaaaatgaagtggcggaattttaaagcgcctgacatcaacttaccgataggttctgttgaagttgcagcattgggttccggtatgggcacaatcagaagaacgaagaacgcgatggcaaatacagccattgccgtgtacattacagggaatatctgagagatggtagctttttcaatggaaccggcaatcaggatacctacgaacatcggagtaatggtggccattacggagttgaaagagccgcccacttggataagctggtttcctttgttaccttcaccgccgagcttgttcagcatcgggttgaccactgtattaagcaaacacatggagaaaccggcgatgaaagcgccaatcaaatatacggcaaaagccatatcagggcttgaatgaccggataaatattggatacctacaccgataaagcctacagctactgctatcaatgccgtttttttataccctacccgttgtagtaagatgccgcttggtattcccatcactgcatatgcaataaagttaccaaagttacccaacattcctaaagcgttggatactgaaaactgatttttcagtacgattcccataggggcagcaaggttggtaacaaatgaaatcataccaaaaaggaagatcatcgtgataattgcgatgagtttaccattctgtttttgttgtgtcatggttttgtaaaattaataagtttataaattggattagttatttcattcttgtacgccaaacttgtagattgtcacttgctggtactcatcacccggtagcaatactgccgacggaaaatggggcttgttgggtgtatcgggaaaacactgggcctcaaagcagactgcacttcttgcagggaaagtggctccatgggcaccttcaaagcctccgagccagtttccagtgtagagctggacgccattttcagtggtatatacttccatggttcgtccgctgttgggctccatgcaggtggctgcaaggctcaactctccactttcagtcttgttcagtacatagcaatggtcatatcctgcgccattcacaatttgtgtatgcttctcatcaattcgttcaccaagagtatggggagtacggaaatccattggagtaccttctactttcaatatctctccggtaggaatggatacttcatcgatgggtacataaaaatctgcgttgatggtaacgatattgtttaatactgtaggagagggattggctataccggcaagattgaagaaaccgtgattggtcagattgacgatggtggctttatcggtagtagcccggtattcgatgaccagagcattggtctcatcctccaggcgataagtcatttctacttcgagatttccggggaagccctcttcgccgtcagcggatgtgtagttgaagatgactgttgattgctctggctggacagcatcccatacacgggtatggaagccagtcggaccaccgtgcaatgaattgggaccgttgttgattgccaattggtgctcttcgccgtataaagtaaactttcctttggctatccggttgccgtagcgtccgatggtagtgtttagaaaaggttccggactgttgattacatgttcaatactgtcgtgtcctaatacaacattggcatatttgccatttttgtcgggtaccatgatggaaagtattgcacaaccgtaattagtaactgcaacttccattccctgggcattcttcaggataaacaaatctgtctttttgttatttatatccttttgaaagtcttttgggcttaaaccggacaaattactttctgttggagtagtgtttatcatatccatggtattaattaaatttcttgcaaataaaaagaaattcttttgttcccccaagcaattggaaggaaatgtggagaacattttaggaaagtttagcgtttaacaaatggaatacaaattgatattttttgtatgtttgctcccgaaatctaaaaaatcacatcattaacagaaagttctaataaaaacaacgaatgtatcctctaaaatttgagcctattctgaagcagacgctttggggaggcgacaagattattccattcaaacatttgaatgatacccttgctaatgtaggcgagagttgggaagtgtcggcagtagaaggtagtgagtctatagtggccaatggtgctgacaaaggattaacgctgccggatatggtcagaaagtataaggaagacctggtaggagaagctaactatgcacgtttcggaaataagtttcctttgttgataaagtttattgatgccaagttggacttgtcgattcaggtacacccgggtgacgagttggctaagaaacgtcataacagttttggtaaaaatgaaatgtggtatgttattgctgctgaccagggtgccaagctgatttccggttttgcagagcagattactccgaaagaatataaggaacgagtgtataatggtacgtttgcggatgttctgcagacttgtgccatcaaaccgggcgatgtgttttatgtgcctgcaggtcgtgtacatggaatcggtgcgggagcttttgtagcagaaatacagcaaacgtcggatatcacttaccgtatttttgattacaatcgtaaggataaggacggtaaatcaagagaactgcatacaagccaggctattgatgccattaattttgcagatgtgcaggacgattttcgtacggaatacgatcaggtgcagaatgaaccggtagaaatggtggcaagcccgtatttcacgacttcaatctatgacatgacggaagaaatcacttgtgactattctgaactggattcttttgttatctttatttgtgtggagggctcttgccgtattattgataatgagaagaatgaagtttccgtacaggcgggcgaaacaatcctgctgccggctgcaacccaagaagtgacgattgtgcctgaaggagcagtgaagttgcttgagacgtacgtataaaagtgctcagactatatcggataaaaaaagaggggatgaccataacagtcatcccctctttttttatccgatattctatctctttcttccaaatatttttctgaatttcttcattacctttacccccaatactataccgtcaaaaacagccataccggtgttgaatgctctcatcatggcatttgccttgttggtagctggttccagtggagcaaaaatttcttgtgtaagcccagtcatgatttctttctggagtcgtatttcttgtagcagcatggcttttttctgggcgatgctttctaaagtgacgggagtggtattggtcgtattatccatgaatatttcgaattaattgtctaagaataattctgcgataagttttactgtcgggtcaataatgagttttttgcggaataggacaagcagaacgatgagtaggatatggaagcacgtgataagtgcaaaactcatcattagcccacctaccagcggagctaagatatagaccagcgtaaacgacagatgaaacagaaccactacgccgagtataacgaccaatagcaccaataaaagcgtagaaagcagtttggacagtttttcggtgacttccagtttggtgtattctttttgcagctccaggtatttcttgaattcaatgaagagctgctgcatattttctatacttttgtcgtctgcaaacatagtggttctgctttttaccttattccgttacctcgcctttgatttccgcagcaatttcatctaccaagtcttccatttcgcttcggttcagacgaatccctttcttacggagaatttctgcgattttgttacgggtgtcttctcctttttcaggagcaaataagataccgagggctgcacctactgcggcgccacccaggaaagctgctaaaacatttaatcctttcataatgatattcctttctttttgaggttcgtacgacaaaactaacaaatttttttgaaattttgttcggtatatcagtttttttatgattgtccttatcttccaactcctttttgggtgttgttttgcgaggtttgcttttttcttctccaaaagtctccattcgtacggctcccgcgatagattttgttttccttggttttggccttaatttcttcagtcttgatttcctggacttttaagccatcggcggtgacaaaagggtgttcttttatcactgggatgtttttccctatcaatttttggatatctttcaggtaaggcagttcttccgattcgcaaaaagagagggcaataccgtcgtggccggcgcgtccggttcgtccgatacggtgtacgtatgtttccggaatgttgggcaactcgtagttgatgacgtgcgatagttggtccacgtcaatgcctcgtgctgcaatgtcggttgctatcagtacacgcagttcatggttcttaaagccggtcagtgctcgctgtcgggcattctgcgacttgtttccatgtatggcttcggctcttattccggacttactaagggtacgtgcaagtttgtctgctccatatttagttctggtgaagataagtacggacttgatagccggattcttcagcagatgaatcagtaagtcttttttctcttttttctcaacgaaatagactgattgggagattgtgtcaaccgtagacgatgcaggggtgacttccactttctcggggtgcgtcagcatggagtttgccaaggtctctatttccggaggcattgtggccgaaaagaagagagtctgccgttttgcgggcaatagctttaatatgcgtcggatatcatgtatgaatcccatgtccagcatccggtctgcttcgtccaatacgaagaattcgagtgcttttaggttaatgaaaccttggttgaccaggtcttgcagtcgtccgggagttgcaaccagtatttgtactccacgtttcagttcatctgtctgtggcttttgtcctacaccgccgaagatgacggcatgtctcaatccggtatacttaccatatgcactgaagcattctcctatctgtatggccagctcgcgggtcggcgtcagaatgagtgctttgatacttttgcggttatccgttttatataacttttgcaagatagggatggaaaatgcggcggttttgcctgttccggtttgagcacatcctaataagtcttttccttgaagtaatatagggatcgatttttcctggattggggtaggggtggaatacccctcttcttgaagagccttcaatataggttctatcaaattcaaattttcaaatgtcatgtaatcaattaagtgagcctcatgctctgtttatatttggcaaatatacgtcaagtcttccgggaaatctctttttatggagtggtttaattatatttaactaaggatgctgaggtataatcgcatgttatggtgtacttttgttccatatttagatagtggcatggaaaaatgatgaaattgcatttaaaatacctttggattgtattggtgacttgtaccttgactgcttgcatgaatggtgggggtgacttggcgggtaagtggcagttgcgtcagtaccaatatgccgacggtacatcagagaaagtggacagtgtattttataattttcaaaaaggaagtttttctgccatatgtttgttgaaagatgggggggcgactacgttttttggaaattattctttgaaaggtgctgaaatttccattattttgttgcctgaaagtgttaacgataaaaactatgatacttatttcgggtggccggaaggaaaacgtatctttaaagtagaagatttatcctactcttcattgcgtttggaatatgagggtacgaaatctgtatttcggaaattttgagataaagataagaatagacgattttactaataaaaacaatagaaaagatgaaaaaattagccgtattgggaatgggagtatgtatagctctggcattctcttcttgtaaatcaagtgaaagtgcttataagaaagcatatgaaaaggcaaaacagcaggaattggccgagccgcagacaactgcccctgttgaagaggtggctccagtagttaccgctccggtagaagtaaaggtagtggaaagtgcacctgccgacatgcgtcaggaaaaggtgactgtggtatcaggtggtaccagcttgaaaacctttagtgtagtttgcggagcttatagcgtgaaagctaatgcggaaggtgtgaagcagacattggtgaatgaaggttatactgcaatggtggtttacaatgcagaaagaaatctgtatcgtgtagttatcggtacattcgatgacagagcatccgccgagaatctgcgtgactctttcaaagctaaacatccttcgaatgatgacttccagaaggcatggttgctgtacagcatcaattaatagaattctttttggtaattcataacagaaaggaatgtatgtttcctttcaagatgaggcagtaactgcgaagttactgcctttttcatgatatgccgaaagaatgtgaaggctggtgctgtcatgtgtttggtttggcaaaacaaagtgttcagtgctgtgaactaatgaactaactgaggaaaggctctgataaacttatgttgtcacagtttctttatttcctcctccttcgtgaatacttcactctatttttctgctccggattgattttcctgattgtgaaaagtgcttataatattctctctttcgtttaaaagaagttataaaacaagaggtggaaacttttggacctaaaaaagtttttaattttgtgctttatctttgagaagaatatggtatggaacgacgatatatactgaatgcgattgatgccgctttgcaggctggcgagaaaattctttccatttacgatgatccggcatcggattttcaggtagaaaaaaaagcggataattctcctcttactattgccgaccgtaaagctcatgaaactatctgccgttttttggctgatacacctttccctctgctaagcgaggaaggtaaacatttgcctttttcagagcgtagaaattgggaaaccttatggattgtagaccctttggacggtacgaaggagttcatcaagaggaacggtgagtttacggtgaatatagctttggtgcatcactcggtaccggtaatgggagttatttatgtgccggtaaaaaaggagctctattttggagtgcatgattcgggtgcttataagctatccggtattactgcgcgtaatggaatgtcctgggatgaattgattgcgaaagctgtccggctgccggaaacaggtatgcacgaacgatttgtcattgtggcttcccgttcgcatctgacgcccgagacagaagattatatcgagaagatgaaatgcagccatgcggaagttgagcttatatcaagtggaagttccatcaagatttgtctggtagctgaaggtaaggctgatgtatatcctcgttttgcccctacgatggaatgggatacggcggctgggcatgctattgcacgtgctgccggaatggaaatttatcaggtggggaaggaagaacctttgcaatataataaggaggatttgctgaatccgtggtttatcgtagagcccaagcatactgaaataaaataacgactgtatgacatttgagatattgtttgtactattggcattgttgggtatggtgattgccttggttctggataaaatgcgtccgggcatggtgctcttttctgtcgtagtattgttcttgtgtgcaggcatccttactcctaaggagatgttggaagggttcagtaataaggggatgatgactgttgccatgctgtttcttgtcagtgaaggcatcaggcagtcgggtgctttggggcaaataatcaagaagctgcttccgcagggtaagactacagtctttaaagcgcagttccgcatgttgcccaccattgccttcatttcagcttttctaaacaatactccggtggttgttatctttgctcccattatcaagcgttgggctgaatcggtaaaattgcctgctaccaagtttcttatacctctttcatacgttacaatacttggtggtatctgtacattaataggcacatcaaccaatctggtggtgcatggcatgatattggaagccggatatgaaggtttcactatgttcgagttgggcaaagtaggaattttcgtcgcgattgcgggtatcctttatctgttcgctttctcctcaaggcttttgccggatgttcgtacggatgcggtaaagctggatgaggagccggaggagcatggagatttgcatcgggtggaggctgtactcggcgcccgttttcccggtatcaacaagaaacttggtgattttaacttcaagcggcattatggggccgaagtgaaggagattaagcgtagcggtcagagcattgccggaaatctggaaaatgaatatctccgcgaaggagacacgctggtggtgatggctgatgactcttttataaagacctggggggaatcttcggtgttcgtgttgctggccaatggcaaggatacggagccggtgcccggaaagggaaagcgctggtttgccttggctttgctgatattgatgatagtgggggcaacggtcggtgaacttccggctgtcaaggaagctttcccggaaatcaagctggatatgtttttcttcgtttccattactactatcattatggcctggacaaagatattcccggcccgcaagtataccaaatatatatcttgggatattctgataacgattgcttgtgcttttgctatcagcaaggcgatggtgaattccggagtggcagacgctgtggcgcatttcattatagggatgagccatcattatggcccccacgtgttactggctgctatgtttatcataacgaacctgtttacggaactgattacgaataatgcggctgcggcactcgcttttccattggcactttccatctcttcacagatgggagtcagcccgatgcctttcttcgttgtaatttgtatggcggcttccgccagtttctctactcctatagggtatcagactaatttgattgtacaaggtatcggtaactataagttcacggattttgtacgcatcgggttacctttgaatatcattactttcctgatatccattttcttgattcctttaatttggccattttaaaaaagaagaaataataacatatggaagaaaacaaccacatatatccgatattcgacagaatgctgatgcggaaggacaaagaagacttgttgaagcagcacggcgtgatgatttggtttaccggcttgagcggctccggcaaaagtacgatagccattgccttggagcgcgaacttcataaaaggagattgctttgccgtatcctggatggtgacaacatccgcagtggcatcaacagtaacctcggctttacggaggccgaccgtgtggagaatatccggcgtatagccgaagtttccaaactctttcttgatacgggggttataacaatcgcggcttttatcagtcctaataacgatattcgtgaaatggcagctgatattatcggacaagacgattttctggaagtttatgtcagcaccccgcttgaagagtgtgagcgccgtgacgtgaaggggctttatgccaaggcacgtaagggagaaattaaaaattttacgggcatttccgctccttttgaggaaccggctcatccggctctgacgttggacacctctgttctcagcctggaagaatcggtcaataaattgttggaactcattttaccaagaattcagaagaaataagatataatgaaagaagaatataaattgagccatttgaaggaactcgaagcagagtccattcatattatccgtgaagtggcagcggagtttgagaatccggtgatgctgtatagtatcggcaaggattcttcggttatggtgcgcttggccgaaaaagcgtttgctcccggcaaagtgccgttcccgttgatgcacatcgattccaagtggaagtttaaggagatgatacagttccgtgacgagtatgccaagaagtatggttggaacctgatagtggaaagcaatatggaagctttcaatgcaggtgtcggaccttttacgcatggcagcaaggtgcatacggacctgatgaaaacgcaggctttgctccacgcattggataagtataagtttgatgcggcattcggtggcgctcgccgcgacgaggagaagtcacgcgccaaagagcgtattttctccttccgtgacaagttccatcaatgggaccccaaaaaccagcgtcccgaattgtgggatatttataatgcccgggtacataaaggagagagtatccgagtatttccgttaagtaattggacggagctggacatctggcaatatatacgtttggaaaatattcctattgtgccgttgtattttgccaaggaacgtccttgtgtggagattgacggaaatctgataatggcggatgacgaccgcttgcctgaacagtaccgcgaccagataaagatgcgtatggtgcgtttccgtacgctgggttgctggccgttgaccggtgctgtggaaagcgatgccgataccatcgagaagattgtcgaggaaatgatgaccaccaccaagagtgaacggacgacccgtgtcattgacttcgaccaagacgcaagcatggagcagaagaagcgcgagggatacttctaaaggaattaaaattaagaattaaaaattaaatcattaaggatgaacgattctacacttgatataaaggcttttcttgataaggatgagcagaaagacttattgcgcttactgactgccggttctgtggatgacggaaaatccacattgataggccgtctgttgttcgacagcaagaaactatatgaggatcagctggacgcactggaacgcgacagtaagcgcatgggaaatgccggcgaccacattgactacgcccttttgctggacggcttgaaggcagagcgcgaacaaggcatcaccatcgacgtggcataccgctacttctcgaccaacaaccgtaagtttatcattgccgacactccgggacacgagcagtacacacgcaacatgattaccggaggctctacggctaacctggcaattattctggtggatgcacgtatgggtgtcattacgcagacgcgccggcatactttcctggtgtcgttgcttggcatcaagcatgtggtgcttgctgtcaataagatggatctggtggatttctccgaagaacgttttaatgagatagtcgatgaatatcggaagtttatagctccattgggtattcctgacgtaaactgtattccgctgtcagctttggacggggacaatgtagtggagaaatcggaacgtactccttggtatgagggtatttcacttcttgacttcctggagacggtacatattgacaacgatcataatttgaaggattttcgtttcccggttcaatacgtcttgcgccccaatcttgatttccgtggtttttgcggcaaggtggcttcgggtattgttcgtaagggagatgaagtgatggcattgccttccggtaagaagtcgcatatcaagagtatagttacatacgatggagagttggattacgcctttccgccccagtccgtcaccttgactttggaggacgaaatagatgtgtcgagaggggaaatgctggtacatccggataacctgcccgtcatggaccgcaattttgaaacgatgctggtttggatggatgaagagccgatggatatcaacaaatcattcttcatcaaacagaccaccaatataagccgtacccgcatcgacagcatcaagtataaagtggatgtcaatacgatggagcatctttccattgacaacggaaagttgagcaaggaaacattgccgatgcagctcaatcagattgcgcgcgtggtgctgaccactgccaaagagcttttctttgacccttatcggcagaataaggctaccggttcgttcatcctgatagacccgataaccaacaataccagtgctgtaggtatgattatcgatagggtggaggataaggagatgcacttgtccgaagacctgcctatactgaatttgcctaagctgggtatagctcccgaacattacgaagccatagaaaaggctgtgaaggagttggagcgccaaggcattgcagtggttgtggaaaaagaatgaacagctttttgatagagtgggagagaaactgtaatatattaatatatagactataatgggactattagaattcaacaagcttcctataaacacattggtaggcgcagattggaaaacattcaaggatataacgggcggtcgtgacatcggtgctgcctacaaaggcaagtatcggctgacaaaagctgtctgccgcctgctgtccactttggctcctctgcaggacagacgttatgaaaagctcctggcagataagcccctggagcatgatccggtattcattttgggacattggcgtagcgggactacgtttgtgcataatgttttctcctgcgacaagcatttcggttacaacacgacataccagactgtatttccgcatctcatgatgtgggggcagcctttctttaagaagaacatgagctggctgatgccggacaaacgccccacggacaatatggagcttgccgtcgaccttccgcaagaagaggagtttgctttggcaaatatgatgccctacacctattataatttctggttcctgcccgaatatcagcaagagtatgccgataaatatctgctgtttgatgatattacagagaaagaactgaaagtgtttgaggagactttcgtcaaattgataaaaatctctctttggaatacgaagggaactcagtttcttagtaagaatccgcctcatacgggacgtgtgaaagagcttgtcaagatgttccccaatgctaagtttatctatctgatgcgtaatccttatactgttttcgaaagcacacgtagtttctttactaacaccattcagccgttgaagttgcaggatatcagtaatgaggagcttgagaagaatattttgtccatttatgccaaactgtatcataagtacgaagcggacaagacatgcattcctaaaggaaacttgatagaggtgaagtttgaggacttcgaagcggatgcaatgggaatgactgaacatatctacaaggctttgtccattccgggctttgcagaggcacgtgccgatattgaaaagtatgtaggcggaaagaaaggatataagaagaataaatacaagtatgatgagcgtacagtgcagttggttcaggataactggaattttgcgctggaacagtggaagtacgatttataatgattgtcaattattaatgagagaaatgattcaaaagaaagttcgtatattgggaatgctgtctgccatgctctgttgcggagcagtttctgcacagcagcacgaggtagagatgattcctttcggaaatatggatcaatggattgaccgccaaatcaaggaatccggtattattggcggtgccacgaagaatgtatatgccatcgggcctactgctactgtcaccgagaccaaggcatacaagaatatgggaggttcgccgtgggcgacatccaatgtgatggcccgggtagccggtatcacgaaaaccaatacttctgttttcccggaaaagcgaggggatggtttctgtgcccgtatggacacccgtatggagagtgtgaaggtttttggaatagtggatatcacggtgctggctgccggctccatgtttctgggtgaggtgcacgaacctatcaaggggaccaagaatccgcagaaaatgctgaattccggcataccgtttacaaagaaacctatcgccatacagtttgattataaagtaaagatgtccgaccgcgagaagcgtatccgtgcaacgggctttagccgtatcacagatgttgagggaaaggacttcccggaagtgaatctgtttctgcaaaagcgttgggaagatgagaagggaaatatctatgccaagcgtgtaggaacgatggtcgtacgatattatattactaccgattggcataataatgccacttattccatcatgtacggtgatatcaccggtgaccctgcatacaaggcccacatgatgcgtcttcaggttgaagaacgctatgcagttaacagtaaaggagagagtgtgcctattaaggaggttgcctgggggacgaaggacgatgtgcccactcatttgctgttgcaattcacctctagtcatggtggtgcttatataggttctcctggcaattcgctatggattgacaatgtaaaattggtctattagaataaaagcagttaaagttgatgtcatactttagctgctttttttatggagtcaacgagactttgacttacttcttatttcaaatgaattttgtatgtcagccctcccgtgaaatatttcatcctctgcatttcgacctgcacatgcagatgcttgaacagcagataagtggctcccaaagcaaagtccttggagtcgtactccgctatcaccctcaactgcggatggaaggtgggattgtaggtgacacccagtgcaaagccattcagtttgtactccttgcggttgttgtaaaggtaggaaagatggacaccgatctcctccttacccacaacgggtatatgcttggaggcggcaatatagaaacggctgtaatagccgttaccttccgtggtgcctacctggccgccgccggaggaagtgaacgggtcggacgtccccagcacgacagccggcatgtatttccagaactgcccctccttcaacacacgcagacgggcggaaaagtagcggtcctggttcgtgaacccgctatacccgtatggcttcaatcccaacgcctccgccttgaagagcgtacacgtgtaggccacttccagaaaggggaagatggtgacgttcaggaaatagttgtaggtatgatagtaccaggtgggcggtgtgagctccttgttcaggaagttgccgccgaccatgaaagtcttgtcgcgctgcatctcagcagagggcgcatgcaacagcccggttgtgccatacgtcaactgggaaaaggccgaaagggaaaggctgcaaaacagaacgataaagaatagcttaaacttcatcatcacatataaattcagtcgctgataaaaaatgggttgctttataacgtgcatcggacatagtaccaaaaaaaggcgtctgagtcccagacgccttcatttttagagtctatttgtcacttggagtgtattattccaggataactacgcggttcaggaagttcttgccgaacatgttttcagtaccaccgaatcctacgagttcaagctggtccttgtcaacaccctgagcaatcaaagcgtcgtaaacaacctgggcacgcttttcagacagcttctggttccaagaagcgctaccggtagccttgtcagcataacctgcaactttgtacttcttgtccggattagccttcagaatcttggcagccagttcgatgttaaccttgccatagtcatccagacgggcgctgccaatcttgaagaagatggcacgcggaccggcaacttcaacttccttggtcacttccttaacttcaagtttagcgttggccagtgcattcttgcagttagccaggtcagcctgagcctgagccagttcacttctatatctgttgatttccgcattgactgcgtcttcgtcaatcttagaaaccggaacgaacttcttaccgccgaagatgtagctaacacctgcggtcagcatacctgtaccttcagccttgcgatggctgctgatattaccgaaaatggacggagcgatggcaccgcgagcttctacgtcaatggcccacttggtgttgatattgaacttcaagcccaaaccggcagaagcacctacacgtgctctagccttttcatctccatcaggaatcattgttccatcgttttgaatcagcacatttgctgactttgcaacagttacttgaggacccaagaatccataaacttcaaagaaacggttaggattaacgcctgcgaacaatgtagaaagattgatcattgcatcaatgttaccaccaaagtacgtcttattgtgttcccaatatgagttatccagacacaagtgctgagtaacgccattgaactgggcacgtacaccccatgtcggagtaatcaacttaccaactgatacgctgaaatgcggagccaatttattgaaaccatcattgttgatagcgtggacaccaccacctacactcacgaaaatattatcgctccatttcggagtgtagtagttcgttttttcttgtgcattcagatttgctgcacaagcgcctgctaataataaggaggctattactaatttacttttcattattcttttagtttaaaattaaaataataactaaaactattattattcagtagcaccgtcaccaccaccggcattgttaccattgccatgaccgtgaccatgaccatgttcagttgaagtaaagactggatctacaacagtcttaactaccttcttaatctttacattaggaatagtgtacagtttgccatccaccactgtagagattgtattatcagaagtttcgtattctgtagtagtcttcaaagttacaatagtataagcaggaactgttactttcttagtataagttacatctgtgatacccgggctatatgatttaaccaatgctttcaacaccttttttacttcatcatcagacaatcctctagttataggcatagcatcaatcgatgcatttacagcagcaatattagtaacttcttgtccaacttttgctgtatatggcagatccatttctttttctttactacttgtattttcaccacctttttgttctcctccaacttcactaggggtaatagtttcctcatcctgatcaacaacaacatcttcagcagcattcagttcttgttgcaagaaaatacttaccggaatcaaagcaaattgtcctttattcaaagcaggaacagtagcttggccttctccagacagatactcgtcttttgtagctgcaaaagttcttgttgcagcagcaatctttccatctgaaccagcttcaattacgaaaggattgctagtaatagcagcaccattttctgtaatgcttgcaccatttatgatagaaccatctgataaatcatatacagtaatagcaacagtagcacttgcagggtccaattctacaggcgcaacattgaattcttctttttcgcagcttgtgaacatcacacttgtcaaagccactgccgccaatgctaatttagcatttacgccacttaaaaaaattttctttttcatctcaattaattaattaaaaatttaacaattctgacttaataaaatatgggttaaaactatttctttccattatattatcacttgcttctgccttatagtccttataataatacctttcattacccgcattataagcaatgcccatgttagtagaagtattcacacgtgggatatgcccccttcttttatatttgtaaggaggcaatgccacttgaaaccgaaatcctccatttgctttggcatgctccgccttcatcgcataaaagcctatcgaacaatagcggaaatgacggatcatttcaaaccgaacccccttttccttcaacaaatactgttcagccttcagtgtgaacagtgtattaaatcgtggccaatagaaatttccacccaaagaccacgtcatacgccataatgaaggatcatattggaacctaaatccgtcccaacgtccagctcccgtatatcctattcttgccaacaaagaaaaacgttcatctttaaaggggcgaaagaaatctacatcagcaccatatcggttaccactaaaatagcctacagagaatttaccaaaaacattataaggcaacctgaaacgttgtgaaagagttaggaaacccggatgaacctttccttcccgagctccatatccatcattataaaccggtatcttcacttgtgctgtggctttcatccccttccataacgaaatttctattgcagggctcaaatcaaatagaatttgataaatctgcgtaataatcacgttcttgaaagagaattccggatacaccaatacatcaatcttgaacaaagaactatttttcaactttatttttcgtgcatttttccaagtatcacccaattcatagcttacattccagtcatcacgttctgcttggagcaccgaatctccctttatgggatgataataaagagaaatctggggtacattattatccagaactattatgcggcatgacttttcttccggtacacctgctaataaatgggctttctatctaaaacacagacaatccttggcttctctctctttgtttgtctgctgttgcataggggattaatgacgcctaacggccatgaacaactctgctaatggtcgtcaagcgattgctttatggccgtaagcagggttgttcatgactgttaggcgtcactaaccccaagacttttcggatgaagtacgtagcctacatctattgtggatagggcgcaaatgtattgtacaacaacttaaaggacattagacggcattattcatagccatgagttagaaatcatccgcttgaatggctcactctaccggtacctttcatagtccctgcggaatgatgcgtcctaccgcccaactcgatatccaccgatttcgtagaagagcaagctcgaaaatgcaggaaaaacgaactgattgatttatgtagctcttacgtaatattatgctagtaaacaggtggttactgcaaaacctcggcgtttcaggcaggtggaagcaaaatttgcttccaccttttcggcttgcttccaccgcagggcaaatgccgatggataggggaatgcagaaggtgggtggaagtgtagaagcaaagtgatggaaaataaatttccagagaaagtttccgccgccatagcaatagccacactcttgatagtttaattgttactggcttattattatatttgttctttcagtaacgctgtgccctatactgtaaatatttgatagttaataaggtaattataaaaaaagacaagagtgatagaacatgaaagcaatttgtaggattgatttttgttactgctttgttactactaataataaactgtatgtttttatttaaagaatatgaaaaagcaattgaatttaaaagagccaataaaggtgagaacaaaaaaattggttaatggatgccaatccatatatctggatatttatatgaatggaaggcggcaatacgaattcttaaagttgtatattatccctgaacataatcaagctgataaaaaaagaaatgtcgagacgctaaatttggcaaatgcgataaaggctcagaagattttggaaatatataatcaaacttacggatttaatcataacagattgtccaatatgaagctgactggctatatgaaattaatagcagaacaaagtgtgaacaatagagtacggaaaagtgccatacatgccgttgtatgccatttggaaagatatactccgaatggaatattgctaaggaaggtggacaagacttatttgttgggttttatagattacttgaagaaaacaaaacaagaacattgtaagaaggaaaagacattgcatgttaacacccaattctattatttgaaaacgctgcgctactgcttgaatagggccgtctctgaagattatataactgttaatccgatgaataagataaagaacgaggacaaaccaaaacgtaatcgaacagaaagggattatcttactataaaggaattgaccagattggttcatactcctttttataataccttattaaggaaagcatttttattcagctgtttttgtgggttgaggcattgtgatattattgcattgagatgggaagatatacgctatgatgaaaatggcaatgcactattgagtattattcagaagaagacgaaagaagccatatcgcttccactctgttcggaagccataaaacatttgccagacagaggaaatgcaccagaaacggaaaaggtgtttgccggattggtctcactggggagaagtaatgtaattttacacaaatgggttgaacaagctgggatatcaaagcatgtaacatttcatacagcgcgccacacacatgcaacaatgatgctgacactgggagtagatttatatacggtctccaaactattgggacataccaatatacaaacaacacaaatttatgcaaagcttgtagatgaaagtaaaaagaaagctattgatttaattcctaatatatcataggggttggttaaatgcgaagtgcaatttgtcattctctttaattcttgcagatatttcttctatttatcctttttcagagaaaagtgaattagcaaaaacatctgaaaaatgactatttggcacaaaaaacaacattctgtatagtaattatgcacagctatattaaggattttaagatagctaatatacttcatataaacattctgagtatttgttgggggcttttgaagaaaaaacaacattatttcattttttcatataaaaatctttggtattattaaaaatgtgtctatttttgcagcatattttgtgttatacgaacacaaaaaatggttgaaaaagatgaggtataaaaactctaacataagaaagtgcctaaatactaaaacaatagcactgtgtgcagcgttctttttatactgtttgctccctttaaaagggatttgccaaacgggggaaagtactgtagatgctttagtggaaatgggatttgaaaatgttggatggacagaagatggcaatgaacgtgtgtatgttctgcagaactctgcatatcgtttgcaaggcgtaggcataggcaaagcggtggatgttattcaaaagatgggtttaccggaagaaaagtcatgccggataatagttctggacaataatgtacctcagatttctctttattatcatcccataaagggggattcggtgctccaagcagaacgtgatgactggaatgtaagctatgaattgggtgatacttggaaaaatgcacgaaaaataaagttgaaaaatagttctttgttcaagattgatgtattggtgtatcctcaattagctttcaagaatctggtgattacacagatttaccaggtcttgtttgatttgagtcctgcgatagaagtttcgttatggaaaggtatgaaattaacggcacagttgaaaataccggtttataatgatgggtatggaaggtttgaagataaagttcatccaggacatattacaatttcacagcgttttagattaccgtataatgtgtttggtaaagtgactgtgggatgttttagtgctgaccaatatggagtggacgccgaattttatcgcccttttaaggatgaacgcttttccttaatggctcggattgggtatacaggaatgggatattggagcggatttcgctatgtatatgatccttcgacagcacttgttacttggtctttgggcggtagcttttattggccgcaatttaacactcagtttaatctgaaagcagaacagtatttattgaaggagaaaggtgttaaatttgaaatgattcgtcattttcgctattgttcgattggtttctatgcaatgaaagcagaacatgcaaagatgaatggaggcttccgatttcaagtggcattacctccttataaatataaaaggaaaggatatatacctcgtgtgaatacctctgctaatatgggcattgtttataatgcaggtaatgaaaggtactattatagacagtataaagcggaagttagtgacaatataatggaagaaaatagttttaacccatattttattaagtcagaattgttaaatttttaattaattaattgagatgaaaaagattaaattcttaaacggcataagtgcagtatttgcgttagccgtagtagctttagctacaactttaacttcttgtgagaaggaagagttcaacgttaatgtaactcctactaatgcacaagctgttattagtccgattgtgcttgctatagaggatggtgttactacagatgtaactggccaagccactatcgcacctgcagagttgacatttactggtaatcctactctggctgctaagagtgttgatgttacagcttcttataatggtttgagtgcaactgttacagttaaggttcctgctttgcaagctgggcaatttgctactctgactccgactatcattcttcaggaagaagatgctgagactaagattgtagcagtacccactacatctacagatgaaaaaacaaaagaaaaagtgtgggataattatgaactttattggtattctatcccttcatttacttatgtagaaaagagcggtgccaaagttgtagaaggttcaaaaaaaatcaacacagacgatcttattgaacgtgctgctattgaatctttcttcaatacgcttgaaaatacctatacggaacatattgaatcaacaaaagatggtgaatattctgtttatgctaactcaagaacaacggcttctataacttatacaattgtaacgactgagtataatgttgtgaaacaagctgtgactaaggctgatgctgatgctttgggttctattaaggttgatgattatactacttctaaattgagtgtctctgaaaatcaggatattcctggtcacggtcatagccacggtcatggtcatggtcatggtgaaggcaatgccggtggtggtgttggtgaacttgattaatagaagttttagttgttatttatcttaaactcaagagaaaatgaaaagtaaattaatgatagcctccttactattggcaggcgcttgtgcagcaaatctgaatgcacaggaaaaaacgaactactacactccgaaatggagcgataatatttttgtcagtgtaggtggtggtatccacgccatcaacaatgacggtttcaataagattgctccgcatttcagcgtgtcagttggtaagctgattactccgacttggggggtacgtgctcaggtaaacggtattactcagcatttgtgtttggatgatgcatactgggaacacaacaagacttatgtaggtggtaacattgatgcaatgatcaatctttctacattgtttgccggtgctaatcctaaccgtttcttcgaagtttacggtttcttgggacctcaaatttctgtagcaaaatctcaaaatgtggatgttacaattagtgctgatggaacttcgcagtctatggctcctgccggtgaagcagaaatgcgtgcacgtatcggcgcttctgccggtttgggcttgaagttcaatatcaacaccaagtgggccattgacgtagaagctcgcggtgccatcgctccgtccattttcggtaatatcagcagccatcgcaaggctgaaggtacaggtatgctgaccgcaggtgttagctacatcttcggcggtaagaagttcgttccggtttctaagattgacgaagacgcagtcaatgcggaaatcaacagatatagaagtgaactggctcaggctcaggctgacctggctaactgcaagaatgcactggccaacgctaaacctgaagttaaggaagtgaccaaggaagttgaagttgccggtccgcgtgccatcttcttcaagattggcagcgcccgtctggatgactatggcaaggttaacatcgaactggctgccaagattctgaaggctaatccggacaagaagtacaaagttgcaggttatgctgacaaggctaccggtagcgcttcttggaaccagaagctgtccgaaaagcgtgcccaggttgtttacgacgctttgattgctcagggtgttgacaaggaccagcttgaactcgtaggattcggtggtactgaaaacatgttcggcaagaacttcctgaaccgcgtagttatcctggaataatatactccaagtgacaaatagactctaaaaatgaaggcgtctgggactcagacgcctttttttggtactatgtccgatgcacgttataaagcaacccattttttatcagcgactgaatttatatgtgatgatgaagtttaagctattctttatcgttctgttttgcagcctttccctttcggccttttcccagttgacgtatggcacaaccgggctgttgcatgcgccctctgctgagatgcagcgcgacaagactttcatggtcggcggcaacttcctgaacaaggagctcacaccgcccacctggtactatcatacctacaactatttcctgaacgtcaccatcttcccctttctggaagtggcctacacgtgtacgctcttcaaggcggaggcgttgggattgaaaccatacgggtatagcgggttcacgaaccaggaccgctacttttccgcccgtctgcgtgtgttgaaggaggggcagttctggaaatacatgccggctgtcgtgctggggacgtccgacccgttcacttcctccggtggcggccaggtaggcaccacggaaggtaacggctattacagccgtttctatattgccgcctccaagcatatacccgttgtgggtaaggaggagatcggtgtccatctttcctacctttacaacaaccgcaaggagtacaaactgaatggctttgcactgggtgtcacctacaatccctccttccatccgcagttgagggtgatagcggagtacgactccaaggactttgctttgggagccacttatctgctgttcaagcatctgcatgtgcaggtcgaaatgcagaggatgaaatatttcacgggagggctgacatacaaaattcatttgaaataattaatgaaaaaatcagcggagggatgtttgatactatcagacatcccttttttctgtattatatatgtaagattaacggcggaattcaaattttaatcgtaattttgtagcccattatgagtagaataatagccatagactacggtcgaaaacgtacgggaatagccgtgagtgatacattgcagatgattgcgaatggactgacaactgtgcctacacaccaattgttgcagtttcttcttgattatgtggctaaggagccggtagagcgtatcttggtaggtcttcctaagcagatgaataatgaggcttcggaaaacatgaagaatatcgaaccttttgtccgttcgctgaagaagaaactgcctgacatgccggttgaatatgtagacgagcgttttacttctgttctggctcatcggacgatgcttgaggctggattgaaaaagaaagaccgccaaaataaagcactggtggatgaaatcagtgcaactattattctgcaaacttatttggagaacaaacgtttctcctttttataatgtatagaaaataatttgtaattagtaatttgtagtaaaggaaatgattttacccatttatgtgtacggtcagcccgtattgagaaaggtagcagaggatattgccccggactatccgaatttgaaagagcttatcgagaatatgtttgaaacgatggaccatgccgaaggcgtaggacttgcagcaccgcagattgggcttcccatccgcgtggtggtaatcgatttggatgtactttccgaagatatgccagaatataaagatttccgcaaggcgtatatcaatgcccatattttggaggtgtccggtgaggaggtttctatggacgaggggtgcttgagccttcccggtattcatgagtcggtgaagcgtggcaacaaaatacatgtgcagtacctggacgagaatctggaaccgcacgatgagattatcgaaggctacctggcacgcgtgatgcagcacgagttcgaccatctggaaggaaagatgttcatcgaccatttgtctccgttgcgcaagcagatgattaaaggaaaactgaatgccatgttgaagggcaaggcacactgcacttataaggtgaaaaccgtaaagaaataagtcaaccatataatatggtataaaaggctcaaaaaatataaaaagtgttccgctaatcccgacaagtaaacgaaaaacgttacttttgtttcgtttacaagcatttataaaacaagatgataagaaaaatactgacagctattttgctgttacccacattgttgtatgcgcaaatcaatacggaacgggtgatgaccattgctcggaatgcattgtattttgaggattacgtgctttctatccaatattttaatcaggtaatcaacgcgaaaccttatttatatgagccttatttcttccgtggactggcaaaaatcaatttggatgactatcagggagcggagagtgattgtgatgctgcgattcaaagaaatccttttgtggtaggtgcttaccagatcagaggattggcacgtatccgtcagaacaagtttgacgaggcgattgaagattataaaaccgctatcaaatacgatccggagaatgtggtgctttggcataatctttccctttgccatattcagaaagaagattatgaggcggctaaggaagatttgggtacgcttctgacaattgcccccagatatacacgtgcctatctgatgcgcggggaagtctccctgaaacagaacgatacgatacaagctttgcgtgattttgacaaagccatcgatatggaccgttatgacccggatggatggggggcaagagctattgtacgcctccagcaggggaagtataaagaggctgaagctgatttggaccagtctatccatctgagtgcaaagaatgccggtaactatatcaaccgtgccttggcgcgtttccatcagaataatttgagaggtgccatgagtgattatgatttggctttggatattgatccgaataattttctcgggcattacaaccgcggtttgctgcgtgcccaggtgggcgatgacaaccgggcaatagaggattttgattttgtgttgaagatggaaccggataacatgatggccaccttcaatcgtggtttgttacgtgcgcagacgggggattaccggggagctatcagtgactattccaaagtgattgcagaatatcctaactttatggccggctattatcagcgtgccgaagcccgtaaaaagattggcgaccataaaggagccgagcaggatgagttcaaaatcatgaagatgcagatagacaagcgtaacggtgtttcttctggtgacaaaaaggaaggtgacgacagtaaggatgttgcggataattcttcggggaactccaatggagatggcgggaagacccgtaagaaatccgacaagaatatggaaaattatcggaaaattgtaatagcggacgattcggaagttgaccagcgttataagagcgattatcgtggacgtgtacaagaccggaatgtgaccatcaagcttgagccgatgtatgctttgacttattatgagaaactgagcgatgtgaagcgtatcgtacattatcataagtatattgaggaactgaaccattcgaaactgttcccgaagccactgcgcatcaccaatatggaagctccgctgacggaggaacaagtacgcttccactttgctttgatagacgctcatacgtctgatgtggtggctgacgagaagaacgccaagaaacgtttcatgagaggtctggacttctatctggttcaggattttgccagttccatagatgactttacaaagagtatcttgttggacgacactttctttccggcatactttatgcgtgctttggtgcgttataagcaactggaatataaaaaggccgaagccacaatgagtgaaggcgccacttcgggtacaacggaaatgaagaagcctgaagtgacggccatcgattatgaagttgtgaagaatgacctggaccacgttatccaattggctcctgattttgtttatggctattataaccgtggcaatgtgtcttcgttgctgaaggattaccgtgccgccttggcggattatgacaaggcgattgagctgagccccgattttgctgaagcatactttaaccgtgggttgacgcacatcttcctggggaataacaaacaaggtattgccgatttgagtaaagccggagagttgggcattgtgtcggcctataatatcataaagaggtttacagatacacgggaataacatttttttgctaaaaaatagaatatcaaaaagaattagctatttttgcgttctgaaaaatgaaatatacatataaactatgataaagataacatttccagacggctctgttcgtgaatataacgaaggagtaacgggactgcagattgcagaaagcatcagttcgcgattggcacaagacgtgctggcttgtggcgtgaacggagaaatttatgatttggggcgtcctatcatgcaagacgctgaagtggttctttataaatgggaggatgagcagggtaagcatgccttttggcataccagtgcccacctgctggccgaagctttgcaggaactctatccgggcatccagttcggtataggtcctgctatcgaaaacggtttctactatgatgtggacccgggtgaaacgactatcaaggaagctgacctgccggccattgagaaaaagatggctgaactggtggctaagaaagaagcggttgtcagacaagacattgccaaggcagatgctttgaagatgtttggtgaccgtggagaaacttataaatgcgagctgatttccgaattggaagacggtcacatcacaacttatacgcagggtgcatttactgatttgtgccgtggccctcacttgatgaccacagctcctatcaaggctattaagctgacttccgtcgccggtgcttattggcgtggacaagaagaccgtaagatgatgacccgtatctatggtatcaccttcccgaagaagaagatgctggatgagtatcttgttctgctggaagaggcaaagaagcgcgatcaccgtaaaatcggtaaggagatggacttgttcatgttctccgacaccgtaggtaagggactcccgatgtggctgcccaaaggtactgcactgcgtatccgcttgcaggacttcttacgtcgcatccaggcccgttacgattatcaggaagtaatgtgtccgcccatcggcaacaaattgctttacatcacttccggacactatgcaaaatatggtaaggactcctttcagcccatacatacaccggaagaaggggaagagtacttcttgaaaccgatgaactgccctcaccactgtatgatttacaagaactcaccccgttcttacaaagacctgcctttgcgtttggcagagttcggtacggtttgccgttacgagcagagtggtgagctgcacgggctgacacgtgtacgtagctttacgcaggatgatgcgcacatcttctgtcgtccggaccaggtgaaggatgagttcctccgtgtaatggacattatctccatcgtgttcgaatctatggacttcgagaacttcgaggcacagatttccttgcgcgacaaggtgaaccgcgaaaaatatatcggtagtgacgagaactgggaaaaagcagaacgtgccattatcgaagcttgtgaagaaaaggggttgaaggcaaaaatagaatatggagaagctgctttctatggtcctaaactggatttcatggtgaaggatgccattggtcgccgttggcagctgggtaccatccaggtggactacaacctgccggaacgtttccaactggaatataccggtgccgacaatcagaagcaccgtcccgtaatggttcaccgtgctccgttcggctccatggaacgtttcgtggctgtgcttattgagcatacagctggtaaattcccgttgtggctgactcctgatcaggtcgctattctgcctatcagcgagaagttcaacgactatgcgcatgaagtgaaacaatacttgaagcgatatgacatccgtgccattgtggatgaacgcaatgaaaagattggtcgtaagattcgtgacaatgagatgaagcgtattccgtacatgctggttgtaggtgaaaaggaggctgaaaacaaggaagttgctgtccgcaagcagggagaaggtgataagggaaccatgaaatttgaagaatttgccaaaaaaatgaacgaagaagttcagaatatgataaataaatggtaactttgcgcccaattgtagaagcatagcatatattagatgttctaaagatcgcttttacttaacataaaacattaatttgggaatagtaaataagaaacaaactggaagtaaacgttatttaatgaagaatgacagcttaaaagggcaacatcggattaacgaacaaatccgggccaaagaagtccgcatagtgggcgatgaagtagaaccaaaagtgtatccgatagcgcaggctttaagacttgctgaagaacatgaagcggatctcgtggagatttctccaaatgcacaaccccctgtttgtcgtattattgattattctaaatttctttatcagttaaagaagcgtcagaaagagcaaaaggcaaagcaggtgaaggtaaacgtgaaggaaatacgttttggacctcagactgatgaccatgactataatttcaagttgaagcatgccaaaggctttttggaagatggcgataaggtgaaagcctacgtattctttaaaggtcgttctatcttgttcaaagagcaaggagaagtgctgctgctccgttttgccaatgacttggaagattatgcgaaggtagaccagatgccggttctggaaggaaagagaatgacaatccagctctctccgaagaaagcggcggcatcgaagaagaacgtggctcccaagcctgcagaagatgcgccaaaggccgcgtcggctgaaaccgaaggagaataaagaatgagtaacgccataggtatagtgcgttgccatataatttaataattaaaaagttaaaaaagatgccaaagatgaagactaactccggttctaaaaagagatttactcttaccggaacaggtaaaatcaaaagaaagcacgcttttcatagtcacatcctgactaagaagactaagaagcagaaaagaaacttgtgctactctacacttgtaagtacaacagatgtaagccaggtgaaagagcttttagcaatgaagtaattgaaaagcgtacaaaagtattaaagttattaaccgaatgcattagctttaagtccgctgcgtgaagtaacggcgctaacattcaaaaacaagtaaaactatgccaagatcagtaaatcatgttgcttctaaagcaagaagaaagaaaattttgaaattgaccagaggttactttggtgcaagaaagaacgtttggaccgttgccaagaatacttgggagaaaggtttgacttatgcgttccgtgaccgtaagaacaagaagagaaacttccgtgctttgtggattcagcgtatcaatgctgccgctcgtctggaaggtatgtcttactctaagctgatgggcgctttgcacaaagccggtatcgaaatcaaccgcaaggtgttggctgatttagcgatgaaccatccggaagctttcaaggctatcgttgctaaagcaaaggctgcataaaaacagttagcagataaactacgaggtgctgattactcttttggtagtcagcactttttgttttctgatagtcttgggaggggttaaaacattaaaagggcttgaaacaatttgctgattttacttgtttctttcatagaaactcattacctttgttatagaaaaaatagccgcattgattggatcgggaaactcatcaatttttatgaaataccgagacaagcttcgcttctcaatggcgggccacgcccttcggggtaactcttgagtcggtggattacaaagaggaggagcactcaaatcatgtcatacggagtttcatcacatcatcggtgcggctttctataaaagaggaacggtaatctgtctggataacccgttcctctttctttttatgcggatgtgggtgattgtgaaacaaatgatacgtgatgctgaaacagatgatgtatcaagggaagatagatgatacgtttatacaaaacagaccatctgtatagggtgaacaggaacagatggtctgttttgaacagaggtttttacggtttatttgttgttcctcaggtcttttaccctgacggcttttccttcgctctgcggtagggagcctttcttcaccaaccgcaatttcggggttactagaatctcgtctttcaactgacgggtgattgctttgcgaatcttctccagctcgatatagttatcggtagagaggtcgctgagttcaacttctacaatcatttcatcttgattattaaccgtttcaagtgtgatgaggtaattactgcccaattcggggaattgtaccagtaccttttccacctgcatggggaagatgttgactcccttgatgatgaacatgtcgtcactacggcctttgatgcggtctatacggatgtgggtacgtccgcaagggcacttgccaggcagaatgcgggtaaggtcgcgcgtgcgataacggataagcggcatcatttctctgtctaaggttgtcagtaccagttcgccgatttcaccttccggtacgggttcgccggtttctggattaatgatttcgaccaggtagcaatcttcccagaagtgcatgccgtcttgttcggtacattcgaaggctacgccgggaccgttcatttcagtcataccgaagctgttgtaggctttgacaccaagcatgcgctcaatctttctacgttgctcgtctgtgtggggttcggcaccgataacaagcgttttcaagcttgtactggtagggtctataccttcttcctggaatacttcggccagacggatggcatagctgggaatggcatgtagggcagtagtcttgaaatcggtgatgaacttaatctggcgcttgctgttgccggcagcggcaggaacagtcagtgcacccagacgttcggctccatactgaaagcccagtcctccggtgaacataccgtagccggagctgttttggaaaacatccgtcttacggatgcctaccatatagaggcagcgtgccactaagtttgcccaagagtccaaatcgtgttgggagtgtacgatgaccgtcggcgtgcccgtagtgccactggaagaatggatacgtactccgtcctcacgcatatcgcctgctactaatccaaaaggataattggcgcgcatatcagccttggtggtaaacggtatcttacgtatgtcttctatagaccggatgctgccggcagtgatgccatgctcttggaatacttttttatagtagggagagttggcggcaatgctgacagtcttttttaaccgttgcagttgtagttcgcgcaactgctcacggggcatcgtttcaatctcttcttcccagtatttgttattcatggtatgttgaaatttagagtcaattatagtttacatcagtttttcagcaatctctttgccggcagccaacgctttgaggttcaactctacaatggcgtctcccttgcgttggaagatttcgcggatgctgtcttgcacctttgcatagtcaatgccgagaaaggggatggtggcgcccagcagtacgatgttcgctacgcggggagagccgacttcttttgccacctcgtttacgttcagcatgattttatgcggcagcttgttgatttcggccttgatgtcttcttctgccggatagttgggaatgttgatgaagggagcttcattggtcaccagccaaccctcagggctgaggaaggggaggtagcgcaacgcctccatcggttccaaggagatgatgaggtcgcattttcctgtggggataaggtccgaggcgatgggttggtcgctgatgcgcaagttggactgcacgtcaccgcctcgctggctcatgccgtgtacttctgcctgcttcatgtagagtccgcccttgagggctgctttgccgattacggtggcgatggagaggataccttgtcctcctacgccggaaagtatgatgtcttttttcatggctttacttgtttctttttttgcgtgctaatgtttggatacattctctgcgggggatgatgacggatacgccgtggtattcgatttcttcccggatgatttgcttcatctcttcgtagttcttcttcaaaggaactacgacacggatgtgttcgggagctacaccgatgccggcgcagatggcttccaaacgtccggtgccggcagagtcttgtcctccggtcatggcggtggtttcgttgtcggagatgacgatggtgacgtcggcgttttcgttgacgcaatccagcagtcctgtcatgcccgagtgggtgaaggtggagtcgccgataacggctacggcaggatgcagaccggcatccgaagcacccttcgccatggtgatggaggcgcccatatccacgcaagagttaatggcgttgaacggagcgttggctcccagcgtgtagcaaccaatgtcgctgaacaccttataagtgggatattcttctttcaatacttgggtcagcaccgtgtacatgtcgcgatggccgcaaccctcgcacaaagcgggcgggcgcatctctaccagagaaggaacgctgaattcagccttgttctctttgcctacggcatgtgccacgctgtccgggttcagctctccgtcttgtgaaagagtgccgtccaaacggccttttactttgatgccgatgcccagatagcctttcagctgtttttctacgaacggttgtccgtcttccagtaccagaatctcgtcacatgcttctaccagctgcatcagctgtttcttgggcaacgggtattgtccgattttcagtaccggatattcgcagccttcgggatagttttccatcaggtagttgtagccgatgccgcatgccacgatacccagctttttgttgggaccgtcggtatatttgttgtaagcggagttttcagaagctttgataaattcgtcctggcgttgcagcaatgctttgtaacgtttgcgtgcattacccggcaggaggatgaactgacgtgggtcttcgctgaaggaaatctcattctgcggttgttgctccttgcgctctacaccggaacgggagtgtgccaggcgcgtaaccatgcgcatcaggatgggttcgccggtctgttcggagaagctgaatccgttgtataccatgtcgtatgcttcctgctggttgcttggttcgtacatcgggatgagggagaagtcgccatagaaacggctgtcctgctcgttctgcgaggaatgcatgctgggatcgtcggcagctatgactatcagaccaccttttacgccggtaatggcagagttgatgaaacagtcggcagccacgttcatacccacgtgcttcatgcacactagtgaacgcttgcctgcaaaggacatgcccagggcagcctccatcgcagttttttcgttagagcaccagcggttatgaatgttcttttcagcagtaaccggtgccatctgaatatattcggtgatttccgtagaaggagtgccgggataggcatatacgcccgaaagtccggcatctaatgcagcttgtgcaatggcttcatcgccaagtaagagttgcttgctcatatctgaatatttaagtgttagtcatggattaatatttgacgcaaatataggattttgcttttattttatcagcagattacttgaaaatctttctttcgtttaatgcatcccaatatcttcttgcatttttcatgtgctcggcataattggatgcaaagttatgggtgcccgagaagtcctctttggcacacatgtagaggtagttgtgtttcgtataattcagcacggcatccagcccgctgggtgaggggatgcgtatggggccgggaggcaatccggtattgaggtaggtgttgtagggggattctaccgccagatggccattcgtaattctccgcaagccgaaggcctgcaaggcaaatttgatggtagggtcggcttgcaggggcatgccggcgtgcaggcggttgatatataaccctgctaccatcggtttttcaggattgttgtttgtctcttcctcgacgatggaggcaagggtgcagatttccgtcggggtcattccgatggcggtggctttgcctaggcgttcctggttccagaacctttggtgctctttctgcattctttcgaagaactcttccacactcatgtcccaatagacttggtaggtttcggggatgaagaggcagggcaaggtctctttggtgtatcccagtttttgttggaatgcggagtcgttcatcagtccggctatttcggcggagtctatcatgagctgtttgcttatgctgcgtgccaggcggtccagcgtgcgtacgctgccgacggtgaggttcataggttcttgatatccgcggtacagacggctgaatacgtgatatacgttttctcttggccggatagcgtagcgtccggtgtgtatgttttcggaatatttcttgtattgggccatccagcggaagccggtgaagcttcggggatggccttgttgtttcaccttattatatatggagtcagcggtgtcgtcgcggtctatatagatatagactgtcttttgcggatggaattgcggggcaaacagatagtagtatactgttcctgcacaagctgctccaataagaattagtgtaacgaatgttccgataatgattttcttctttttcttttccattttgttttactgcatctttagtcgggcaaagttagtaaaaaatggagtgaaaatcatcaagtcatatcagttaattcgatagctgacaaaggctatgcgtttgctgtccggtgcccatgagttgacattgatggtgccttgtccgccgaaaatctttaacaaagttttgggttctccaccgtttgcgggcattaggcgtagttctacgttcttgtttgccagatgctctcccggttccaggtcacctttgtagtaggtgatgaatacaacggattttccgtcaggagagatgtgggggaaccaggagttgcgggtttcgtcaaaggtcatctgggtctgttcggagccgtctgccttcatgcgccagacttgcatgagtccggtgcgtacggagttgaaccagatgtattgtccgcagggggaatattccggtccgtcatccagaccctcggcagtggtcaggcgggtttcttcacctccttccacggggatggtataaatatcatagttgccgtttcgttcggcgcaataggcaagttctttaccgtcgggactccaaccgtggaggtagctgggagccataggcgttattaaacggggagtgccgcccgtgatgggaagtgtataaatgcgcgatttatagtcctctttcgtcccgtggctgatggctatctgctgtccgtcggccgagaggacgtggtcgttgttgcagttttgggcaaatccggtgtttatcagttccggttcggcagacgaggtgggggaaaggcggtaaagctttccttcgctgttgtatagcagccattgcccgtcgggcgtccaattgggggcttcaatccggtagggaaattctttgacgacggtccggttaccattggttacatccagtatttcgaggacgctggtaatctcgtttttttgttgagcggttgcggtcagtgcaacagttgcaaagaaggggattaaatagggtttcatgtttatatcgtatttaataaatctccgcaagatacattttttattggaaactacatagtcggagcattttttttattaaaatctgtagtgctgaccgaatgcgtagtgcttatcatataaataattattgcaatgaatatttttgagggctacggtagattatgcttttcaaaatctctcaaatatccattcatctaccttcagttctttgcctttaaatacgaaataaaggttgtgaataccgtctttgtctgtgtttatctttgtagagacagtctgtaaagagtctgaattgaaggaggtggaggccagtacttcaccatcggggcggtcaaggtgcacttccagagtgccgtgtcctactgctgtggcacggaatagagagggaaagccggagaagaatacgccacgtacggatataactgatttcttttgttcactgcccactgcaagcatgttgccgggtgtggctgtaggctcaaagtgtatgcctagcgtagcggctgttgtttctgcttgctgatgaatgaacgggttcactggctttatctggtccacacccttcagtgtggcttctcccatttccagcttcacgtttttttcgtctaccttcagcttgttgacgcaaaggctgcggaaaccgccattggtgcctttgtgttcttgcaagcacatgttgtgataaaataggtaatagtctcctttgtatttttgcagatgggtatgattgttgctgaaccccataccatagtctccgggattcttgaaataattgtccacatacttccagctgtcggtgtcgagaggcgtgtgtgaagtcatgtacgacatgcagcagatgctgggtttgtccactccctcgtggggccattcggtgcgcttgttccagtcggtattgtaggtataaatccatgtgccgttccagtagttcagctcattggcttcgaagtgatagggagcttttatctctactatctcgctgtccagactaatcaggtctttgcccaagcggacaatgcgggcatctccaggcatgtagtcggtgccgacttccccctttccgcctccaccgaatgataaccatcctataccttcgtcatctatcacggcacccgggtcgaagggagctttgcagtggcctaatccttgggtgaactggctcaccagcatacgccccagcgggtcggtccacgggcctacgggagaggtggaggttagtacgcctacgcccgcaccgctgttggagtagtagaggtagaagtgggttttaccgtccgattctatccgcgatacaatggatggagcccatgaggctataccccatggtgagagggcctttacgtcaatcagtccgtgataagtccagtttaccatgtcatcggtagacaacataaccagcgaatggatgtattggtatgtgtttttgccatctttccccacactgtccagttgctgggtgtcattggttccatatacatagagccttccgttgtattccatcgatgtcgggtcggccacaaaaatgaaatccgacagtgggttggcgtttccactgaagaatttgggtgattctaccggatgcgtgtctttctttcctgaagtggaaagcgcccacatatcgtttcctgcggacatagccgccagcagcaaagctgctgtaaataacttgattcttttcattttcttatagtatattatagaaatctatggtaaccttttgattttagcttgtgttttttcgtcatctcaatacttcatttaagattgaaaaatttggttattgaaaagttgccacaaatattgggaattactatatataatataggtgtattatgtttttaatagtgtatctatatgtttcaagttatcattttagactgtggatgtaatcagatggtgctgttttaaacctattttgagataatcatgcggctatagattaaactgtttgaaagggcattgtgttttatgcaaatatactcgtagaagagcgttttttattttagaaaagaaaaagcactgattatctggaataatcagtgctttaatattgagccgctagccagacttgaactggcgacctacgcgttacgaatgcgttgctctaccaactgagctatagcggcaataaacttttgtttacggggtgcaaaggtacatctttatttgaaaaggcaaaaagaatccttgttttttttagaaatattttagtagaataattttctgtttgaatgttctgaactttattgccttaaaaattggataataaaacgaaaagaagcatctttgtcgtaggtcctatagcaaaaagtctgatactgattatgaattttagaacatattataaatatctttcttcacgcatagcgtccaaatgggtggtgttgtcggtagatgtaattatcgttgtgatttccatactttctgcatgttttttgcaatataggctttcgtccgtatcttatgaaatttctttgtatgtatggctgaccatttgggctgtattgtgtaatgtctgtttctttcatattttccgtacttatgtaggtgtcatccgtttttcttcttttgtagatatttatcgtgtgttttggagccttacgataagctatgttgtactgtttttggggaatttctgttggtctgttttggggcttgaagaaactttgccgaacagcattctgtttatggcatatatgtttactttctctctgatggtttgtatgcgcattgctgtgaagatgctttatgaagctattgcttttgatgcacgtcattgcgtgaatgtttttatttatggattccatgggactggagtcgatgttgcaaaatccttgagagttagtcgtaataatcattatcgcctgcgtggctttatttcggacgaacttgatatgataggtaaacatacgatgggatgcagggtatatcccaatgatgaacagctgtttgatcgtctaaagaaaaagaaagtggatacaatcattatctctccaagcaaggtatcggatttggaaaattccggaatgctggataaactgttctctcatgatattcatgtaatgaccgttcctcccttaagcgattgtatggatgatggactgataaaggacattcaaatagaagattggcttcgtggagaaccggtacaagttgacatgcgtaaaattgcggcccatattgaggggcgtagagtaatggttacgggagcagcgggagctgtaggaagggaaatcgtccgccagttggctacactgaatccttatcagttgattctggtagatcaggcagagtccccattgtatgatgtacagttggaattgtctgatcattggaagaatctggaggtccgcgtattggttgcagatgttgctaaccgtacgcgtatggaggctatatttgaaggaacacgtcctcaacttgtttttcattctgctgcttataaacatgtacaactgatggatgattttgtgtcagaggcaattcaaacgaatatatcgggaacagtgaatattgcggacctggcggtaaagtatagagtgtcccgtatggttatgatgtctgtaactaatgcacgtcatccggagaatgctatggaatatagtaagcgtgtggcggaaatgtatgtgcagtcatcttattgcaggttgaaacgcgacaaaggggaaactgatatgttcatagtacgtttgggtgagatgtatccgatgaatgcgcattgtttgatgaccttgtctgaagcttgtatgctcaccctggaagtgggagtcatgggggatggaggagaagtgtacattgtaggagggcctggggatgggcttttggattctgtaatcagtgaaaagataaagcgtgaaaaggcatctgttgatgattatgaacatgtgcgggaagaagtgctggccttggtgcaacatagttataccgaaaaaaaggctattttgattggactaatgaaaaaaatagtgccaattttctcactttcttctacccaaggaaaagacgtgaaaatgacagctttttaatgctttttctgaaacttagaagtggaataaatgtatattataaaataatatattacctttgtgcccgatttatatttattacaagaactcaaaagattaatcagaatattttatgcgtagattaataacactattctttttggtatttactttgtcaggagtagcttttgctcagcagatgtcagatgatcaggttgttcagtatgtaaaaagcgctcagcagatgggtaaaaatcaaaagcagattactactgaattaatgcggcggggagtgacaagggaacaagttgaaagaattcagaaaaagtatgaaaattctaaatctggaagtccgcagagcaatacccaagatgagaaacgttctcgtcaacgtggtgaaatgagtggcgtagtcaaagggttgcgtacaacttcggaaacgtattctgccaggcaaacggatgttgcaggggattctttacaaatgatggataatcgttccttgtctcaagagaaaggggcgggggatccgacttcgcaaatttatggtcataatatttttactaacgataatttgactttcgaacctaatgtgaatgttgctactcccgagaattatcgtctgggacctggtgatgaggtgattattgatgtgtggggagcttctgaaacaacaatccgacaaacaatatctccggaaggaagtattcttgtgaataatttaggaccggtttatctgagtggtaaaacagtaagtgaagccaataattatttgaaacaagaatttgccagaatatattctggagtaactggaaatgttccctctacccaagttaaattgacattaggagaaatacgttctattcaagtaaacgttatgggtgaagttatggtgcccggaacttataccctctcatcatttgcttccgtattccatgctttatatcgtgcaggtggtgtgaatccgattggtagtttacgcagtattaaagtgattcgcaatggaaatacaatagcagatttggatgtttacgatttacttatgaaaggaaaaatgaaggatgacatccgtctgcaggatggtgatgtaattcttgtggatccttaccagtcattggtacagatattgggtaaggtaaaacgtccgatgttttatgaaatgaaacccactgaaaccgtaggcacattattgaagtattcaggtggttttacgggtgatgcttataaaaaagcattacgtataatccgtaaaagtggacgtgagcatcaaatttataatgtggatgagatggattattctgtattccgcgtagatgacggtgataagataacggttgattccgttttacaacgttttgagaatcgtgtggaagtccgcggtgctgtatatcgtgaaggcttgtatcagttggacggtacgatgaatacagtgaaacagctgattaagaaagcagaaggacttcgcggagatgcattcttaaaccgtgctataatcgatcgtgagcttgaagacttgtcgcatgagattatacaagtagatgtgaaaggtttgctgaacgggacggctgcagatattcctttgcagaagaatgatattttatatatcccaagtattcatgatttgaaggaagaagctacacttaccatccatggtgaagttgccaatccgggtacatatctctattctgataaaatgacagtagaggatttggtgttgcaggctggtggcttgttggaggcagcggctacgacgaaagttgaagtggcacggcgtatgaaagatacgaagagtacatctttcagtactacagtaggccagaatttctcttttgatttgaaagatggcttattggtgggagaaggaagccaggatttccatcttgaaccttttgatgaagtttatattcgtaagagtccgtcttattttaaacaacagaatgttatggtgggaggagaagttctttttagcggtaattatgcactatcgaaaaaaaatgaacgtttgagtgacttgatagctaaggctggtggagtgactcccgatgcttatgtaaaaggagcgcgtcttattcgtaggatgaccgaagaagaatttcgccgtaaagaagatgccctgcgtatggcgcaagcgggaggtggagattccatatctgtaaaaaaattggatttgtctgatacctattctgtaggtataaatctgggagaggctttgaagaatcccggttcagatgctgatatggtgcttcgtgagggagatgtgttatttgttccggagtacgtaagtacagtgaaaatcaacggtgctgtaatgtatccgaatacagttttatataaaaagggtgaaagcttgaaatattacatcaatcaagctggtggttttggtaatgatgccaagaaacgtaaggtctatgtaatatacatgaatggtacagtttctcgtttaaaagcagggaacaagaaagccattgaacctggttgtgaaataattgttccaagtaaagaacagaaaaagaagatgactactgctgaaattctgggaatgggaagtacgacagcttctattgcagcgatgattgcgactatggttaatctctttaagtaatttgaattatgagcgaagaaagaatacaaaacataacctctccacaacctgaggaacaagaaatagatttgatagaactggcccagaaagtatgggctagtcgcaaattggtttttaaggcgtgtggtatcgctgctcttgtaggactggttgttgcatttagtattcctaaggagtactctacaagtgtgacattggctccggagagtggtggcaaatctggtggtggaagtatgggagcccttgcagccatggcgggtatcaatttgggcacttcttctggtgaggatgctttgtcacccgaactttatcctgatattgtaagttctactccttttctgattgaactgttcgatgttaaagtcaaggatcagaaagcaaaagtagacacgactttatatgcttatttgaaagaagaacagcgttctccttggtggagtgcaattttctccgctccttttaaagtgttaggatggacattgtctttgtttaaggatgaaccggaagagggggacgcaaagctggatccttttcgtcttactagagatgagtctgccattgcagatgctttaagtaaacgtatctctgtttccgtagacaaaaagacaggtgtgacaaccttgtctgttactatgcaggatcctttgatatctgcttcgctgacggataccgtgatgcattgcctgcagaactacatcacagattatcggactaataaggctcgtcatgatttggcatttaccgaaaaactttatggagaagcaaaggccagttatgaggatgcccagaagaaatacgcaaattttgtagatgcaaaccagaatataatattactgagttatcgcgcagagcaagagcgtttacagaatgaaatgaatttagcctatcaagtatatacacaagtgtctcaacaattgcagatggcaagagctaaggtgcaggagattacaccggtatatacggttgtccagccggctacggtacctttgaagcctgcaaagcccaataaattgatgattttgatcggcttcatgttcttggcaggtgtcggcagtgtgggatggatattatttgtaaaagatttattaaagggatggaaaaagcaaacaatatgatgacggataatgatatgatgtgctggcatgcattgtacacagcacctaagtctgaacataagttgatgcagcgtttgaatgctgcgggatatactacatattgcccgatgcaggctgtgtttgtaaaatggaaagggcatacccggaaggtgattacccctcttttttccggatgcttgtttgttgctggtaatgtggcggaagttgcctcattggcttcctcgcagaaggctgctatattactagataaagaaggaaaaagtttgtctattgaagcgggtaaagcagaacttcctgccaagtttgctcaattgctgaggttatgatgaagctgataacagaagagctgctggataccgttacttcacaagccaaggagaattcccgtttacgtatgaattataattttcatgcgtctatggatgcccctattcatcggttgctgaatgctttggaaccaggaacttatcttcctcctcaccgtcatacagataaggaagaaacttatctggttttgcgtggaagtctgctggcatttttttatgatgatgccggtaatgtaacagataaggtatgcctcaatccttcggaaggtaaatatggtctggagattccttctaatacgtggcatagtattattgccttggagtcaggcaccgttatttttgaaattaaaaaaggcccatatcagcctctaccctcagaggatttggcttcatgggctcctcagacttctgatgtggagggaataaaggcttttatgaagcggatgttggaactttaatatttttttgataaaacaaagaagcctcccgatatacaataaaatatcgggaggcttctttatgtaccatgttattagtcaaacaggctcttgaacttcttgaatattttctccttaatcgaagtgtttggcttgaagttatcagattcttccatttcctccaatgttttcttctcatccttgctcagcgtttcgggtacatatacgctgacatttactagcaaatctcccgtgccgtatccattcacgttgggcaaacctttgccgcgcaggcggagtacttttcccggttgcgtacctgagtcaatttttactttcacctttccatcaatcgtgggaatttctactgcaccacccaaggctgctgtcgggaagctgaggagcaggttgtaaatcaagtcattttcgtcgcgtatcaggttcgggtcttgttcttcttctacaagaatcagcaggtctcccggcataccgttgtgcttgcctgcatttccttttcctcccatagagagctgcataccttctgcgacacctttcgggatttttacggttactacttcttcaccgtatacaataccttcaccggcacattccttacacttgtttttgatgattttgccttcaccgccacaagttgggcaagtggttcttgtttgcatggtgccgagtatggtttgctggttacggattaccgtgccgctaccgttacaggtcgggcaggtttcggcgccgccgtcgccttcggctcccgtgccatgacagtgggtacaaggcacgtatttcttcagcttgaatttcttttccacaccggtagagatctccttgaggttcagttttaccttgacgcgcaagtccgaaccacggtaacggcgttgttgtgtgccgccacttccgccgaaacctccaaaaccgccaaaacctcctccactgtgtccaccaaagatatcaccgaacatggagaagatgtcgtccatggacatgcctccactgaagccgccgaacggaccaccattaccggcggcaccacccagtccggcatggccaaactgatcgtagcgggcacgcttgtccggattgcttagtacgtcgtatgcctctgccgcttccttgaatttctcttcggctgttttgtcgcccggattcttgtccggatgatattggatggcttttttgcgataggctttctttatttcttctaccgttgctgtcttttcgacttccaatacttcgtagtaatctcttttttccatacagttttatgttattctccgactaccactttggcatgacggatcactttgtcgtttaggatgtaaccggtttgtacgcagtccagaattttgcctttcagtgcttcattgggtgccggaatcacggcgatggcttcgtgatagtctgtgtcgagcggttgttcctttgtctctatcaccttaacgccgttttgtcccaatacagacatgaatttgttgtagataagttcaacgccttcttttacggcagctacatcggtagctgtctccatgtttttgagggcgcgttcaaagtcatccacaatgggtaggatactgctgatactcttttcaccaccgttcaggatgagttctgccttctccttcatggtacgtttgcggtaattgtcaaactcggcagacaagcgcagatatttgtctttctgctcttcaatctgttcattggccttttccagttcctgggcgagcttttcttcttctgttaggggagcttcgttttcttgtgaaacttcttgtcctacggtttcttcgtcacattcgttaggagtagcttgagttttcagctcctcttcctggttgttttctttttctttcggattcatattgttatgcttattattcttgtaaaatgattttgctttcattgctgttaagggtttaagttaatacgatatcagtgctccagcaaaaactttgccaaaacggatgtttttgccgaaaacgctgcaaaggtaatacttttatgtcagattgacagcgcttctctgtgtctattcatggaaaaataactatctttgcactcgcaattcgcagactaataggtattaaatagtaaattgtaaataaataaatcgtaaatataaagatgattacagtctctaatgtctcagtacagtttggtaaaagagtgttgttcaatgacgtaaacctgaagtttacaagtggtaactgttacggtatcatcggtgccaacggtgccggaaaatctactttcctgaaaacgatttccggggagctggaccctacgacgggttccatcatgctggctccgggagagcgtctttccgttttgagccaggaccactttaagtgggatgcttttacggtaatggacacggtgatgatgggacacacggtgttgtgggacatcatgaagcagcgtgaagtgctgtatgccaaagaggatttcacagacgaggatggactgaaggtttccgaattggaagagaaatttgccgagctggacggctggaatgccgaaagcgatgctgccgccttgttgagtggtttgggtatcaaggaggacaagcattatctgttgatgggtgagttgaacaacaaggaaaaggtgcgtgtcatgctggcgcaagctctctatggaaatcctgataacttgctgctggacgagcctaccaatgacttggatatggagaccgtgacttggctggaagagtacctctccaactttgagcatacggtgctggtggtaagccacgaccgtcacttcctcgactccgtttgtacgcatacggtggacatcgactacggaaagattaacctctttgccggtaactatagcttctggtacgagtccagccagctggcgctccgtcagcagcagaaccagaaggcaaaggccgaggagaagaagaaagagctggaagagtttatccgccgattcagtgccaatgtggcaaagagcaagcagactaccagccgcaagaagatgttggagaaactgaatgtagaagaaatcaagccgtcatcacgtaagtatccgggcattatctttacgcccgaacgcgaaccgggtaatcagattctggaagtttccggtttgacgaaaacgctggaagatggtacggtgctgttccgcgacgtcaacttcaatgtagagaagggagacaagattgtattcctttcgcacgacccgcgtgccatgaccgccctgttcgagattatcaacgagaatatgaaaccggatgcgggtaccttcaactggggtgtgactatcaccaccgcttacctgccgctggacaatactgcattctttaatacagacctgaatctggtggactggttgagccagttcggcgaaggcaatgaagtctacatgaagagttttctgggacgtatgctgttctccggtgaggaggtgctgaagaaagcaagcgtattgtcgggaggtgagaagatgcgttgcatgattgcacgtatgcagctgcgcaatgccaattgcttgattctggatacacctaccaatcacctcgacttggagtctatccaggcattcaacaataatctaaagacctataagggcaatatccttttctcatcccacgaccacgagttcattcagacggttgccaaccgtatcatcgaattgactccgaacggtattatcgacaagatgatggagtatgacgaatacatcacttcagaccacatcaaggagttgcgtgcacgtatgtacgcaacaaagtgataacggaagctaaggactaaataagcatattttaaatcgttccatcatgaggaaaaaatcgttccaccatggtggaacgattttttcaccacggtggaacaatatttctgccatgatggaacgattcttctttcatatcttttttgtttaataaaggcttgtgcgatattgaaaaaaagaagaaggtgtgttagaatgatttttagctatcattctgacacaccttcttttgctattaaaagagtctctttgttcttattaaggcggggaatagtctgggttattgtttctccttatatataattttgccttggctttcgccgaaaaggttgtcgcccagcgtggtaatcttattccccgtggcaagcacatagcgcaggttgtcgcatcccataaatgctccgtactcaatggcggttacactagcaggaagcaccagcgtgccgcacaaacgaccgcagccactgaatgcacgctgtccgatgcttctaagctcttgcgggagccgtacgttcagcagatacttcttttgggtgaaagtatagtcgggaattgcagtggcattactgttggtcatgtcgatggaaaccagattgggcatatagtcgcgtatcaatgtgaagtcggcttcgtccattttaccttcaacggtcagaaagttaacgtctttgggctgaaatccggctcttagcagttcgctggcaaggctgcccattttaccaatctgcacatttactgtcagtggttctccttcaatgaatgcaaaggtctcccatttctttttggtacggtaggagtcactgcatcccaatggaacaaatatggctgtaacgctatcagccaatgcttcggacaacagattgggagccgttttcttccgtatctggcatatcttgagatttttgcatcccttaaaggcagcatcttcgatgttcttggtcttgtcggaaaggataaccctagtcagtgtctccttgccaatgaaggtactgtcgtccatttgcttgcagaaggcatatgccggaatgcaattggcaggatatacgtaaaaacggtttggataagttccgttcttgcctgcatacgtgctgatagatgcgttcgagatgtccaactgctgcagattcttgaattcatctcttagatgcctgaagtctatggcattcagtttgccctgcagggttagttgggtaatttcattagcttccgcttcagtcatcagctccaccaaggtaccgggtttggctacgtagtatcttttggatttttgtgccgaggcattcagcattaacgccagtccggcaatggctaaaagtatttttcttagtttcatgtttattgattctagattgatttttcaaatataggaagaaaacggcaggaatacatgaggttttttctttttattattatttttgtcggatattaatcaatattgagatacaaatggagacagaagagacggtaaaggaagggcttgttacagcaagtaaagcaaaaagtatttggttggcattcgttgatatagtactgtttgctgtactttcaatgatttttctgtttttgtttgccataccttttgcattagtttttccggagttgaagacggaagttggtgaaacaaacatttactttcagatgctgaatgaagtcttgatgctggtcagtgggctgattgccgcttgtatggtgttgggctttaggaagcttcctttttcgggtttgggcttgtctttgaagggatggggcaggagcctgctgagaggagctttgtttgtcgtgttcttgtatgtagtcggttttggcttgtctttgctgttaggggcagtggaggtggtagggttcttgttttctcccatatctctgctggtcagtcttttgctttatttttttgtggcggttacggaagaagttatcggacgcggttttattttagggcgtatgctggatggaggcatcaataagtttgtggcattgtttatttctgcggtgttattttcgttgatgcaccttttcaatcctaactttgcctttgtcccgtttctgaatatcatggtggcaggttgtttcttgggggcttcctatatatatacgcgtaacctctgtttccccattgccttgcattggttctggaactggattcaaggttccgttttgggatataaagtcagtggaaatgaattcagcaatgagaatctgctgattcttcactttccggaagaaaatttaataaatggaggaaccttcgggttcgaaggctccattctgtgttcactacttttagtgcttggtacagtaattatcttaagacactattataagggattagagattaaggattaatacggaaaccattaaccattaatccctaatccttaatccctaattctgttccactcctttcattgtcagctgtatgcgtttccggtccatatctatgctgagtacctttacgcgtatatgctggtgaatggacactacttcattagggtctgatatgaatctgtcggcgagttgggagaggtgtaccagtccgttttccttgatgcctatatcgacaaatgcgccgaagttggtgatgtttcctacgatgccgggcagttccatgccttcgcgcaggtcgttgatggtgcgcacgttcttatcaaattcaaatatctttatcggtccgcgcgggtcacgtccgggcttgtccagctcttgcaggatgtctttcagtgtcggcatgcccacggtgggggagaggtagcgttccggattaatcttcagacgcagctcccggctggctatcagttcggctacgctgcaatccaagtcctttgccatctgttctacgatgcaatagctttccgggtgcacggcagtgttgtccagcgggttctttgcctgcggaatgcgtaggaagccggcacattgctcaaatgccttggcgcccatgcgcggcactttcatcaattctttacgggaggtgaaggcaccgttttcggcgcgatagttcacaatgttctgtgccagttgaggacccaatcccgagatataggtcagcaggtggctgcttgcggtgtttaggttgacacctaccaggtttacgcagttctctacagtttggtccagcgactttttcagttttgtctggtccacgtcatgctggtattgccccacaccaatagatttcgggtcaatctttaccaactctgccagtgggtccatcagtcgtctgcctatggacacggcaccacgcacggtgacgtcgtagtcgggaaactcgtcccgtgcaattttagaggccgaatagatggaagctccctgctcgctgacgataaatatctgcacatcgcggttgaagcgctgatgcttcaagaactcttccgtctcgcggctggcagttccgttacctatggctacggcatctattttataggactccatcatcatttgcagtttggcgaatgcctccttctgcttgctgactggagggtgggggtagatgttctcattatggagtagatttccttgtgcatcgaggcacacaactttacaaccagtacgaaatccggggtctatacccatcacacgcttttgccccaatggtgaggccagtagcaattgacgaagattttccgcaaacactttgatggcttcctcgtcggcgcgctccttgctttgggtcgcgaattccgtttctatggacggttttaacaggcgtttgtaagcatcttgcacagcttctgctacttgctgtccacaggcgttgttgctccgtacgaactgccgttctaggcgctccgcacactcttcgtcattggggctgatgctgactttcagcaaaccttccgcttcagcgcgccggatggcgagcagacggtgggaactgcatcgccgcaaggattcggagtagtcgaaatagtcgcgatatttggccgcttcttcttctttgcctttcaccaccttggcggtcagtgtgccttggcggacaaaggaactccggacgctgtttctagcccgttcatcttcacttacatgctcggctatgatgtcacgggcacctttcagtgcatcttccacgttcttcacgtctcctttcacataaccggcggcgcgttcctccggatggggctcacgttgcagcatcagcagggtggcgaggggttccagtcctttttggcgggctgcttcggcacgtgttttccgtttgggtttgtagggaaggtagatatcctccagtagggtgttctcccaggtctcctcgatacgcttctgaagttcggcggtcagtttgccttgttcttgaatggtgctgaggatggtttctttacgtttggcggtttcgctcagcttttcgtagtgggtctttatggattcaatctgcacttcgtccagtcctcccgtcacttcctttcggtagcggctgatgaaagggattgtcgctccgttttccagcaagccgagggtctggcttatttgtttttctgatatgccgagaacggcagatatcattcgatgaaaatcttgtatcattttgtatctcattttataaatagggggtaaaagtacaaaaaaacaattgttgttttttctttaggttccaacttttatctatatttgtcaaagctatggagcaattaaacgaatcaatcaattgaaacacatatatcgtacaatattaccatgcgtggtagcgcttttctgctgccttttgcctgttttctcaattacgggagagcatccggtattgattatcagctcctataatccggatgccggtcggacttccagcaatatctctgactttatggaggaattccaacgtttaggagggacaaataccgttgcattggaaaacatgaattgcaaaagtttttccgaagctcctttttgggaaaagagaatggcagggctattatccaaataccagaatgataaaagtccggcattgattgttcttattgggcaggaagcttgggctgcctacctttctttggaagactctgtacgcggcaatactccagtagtgagtgcgctatccagccggaacgccatattgttgccgggagataccatcgatttgaaaacttggatgcctgaatccgtagattttttcacggattttccggattcgcctatcaaggccggtttcgtttatgagtatgatgtggaggcgaatattaacatggtaaagcagatgtatcctgacaccgagaatatcgcttttatatcagacaacagttatggtggtgttgctatgcaagcctatgtagtgaaggaaatgaagaaatttcccgaattggatctgatactgcttgacggacgtgtcaatacaatatatactatttgtgataggttacatgaactgccggaacatacggcagtattaatggggacgtggcgcgtggatatgaatgatggttattttatgcgtaatgctacttatgccatgatggaagctgctccagccttgcccacattctctttgagttctgcaggtttgggatactgggctgtggcaggcatcgttcctgcctaccgtgctttgggcaaggagatggcaaggcaatcttatcgtctgctgactgacccgcaggatgggaatactcatatggaagtcattccgaatgagaccatactggacggcaagctcgtgaaggaaaaggaactgaatattgccaaccttccggaaccggtaaagatgctgaatgtaaccccttctttctatgaacagtacaagtatcatatctggtctgtctgtgctgtgctattggtgctgttgggcggtttgttcgtttccctttatttttattatcatacaaagaagttgaaggatgaactggaggtatccgaaggtgctttgcgagaggcaaaggaccgtgctgaagaatccagccgcctgaagagtgctttccttgccaatatgagccacgaaatccgtacgccattgaatgcgattgtgggcttctcggacgtgctgtctgccggaggagcctcggaagaagaacagcgtggctattttgaaattatcaggaccaactctgatttgctgcttcggctgattaatgacatattggatgtgtcccgtttggaggccgaccgcgtcatcctttctttggagagctgcaatgtagtgcagatatgccagcaggtagtagcttccgtggcccaggcacgtaggtcgaccaatcaattcctatttgagtgtgaacgtgaggtggtggagatgcggacggacgtgcagcgtttacagcaggttgtgataaatctgctttccaatgcggacaagtttacaaaggaaggtacgataaccttgaagctggaactggatacagcagggaatgtagcagtattttcggtgactgacaccggttgcggcattcctttggacaaacagaaacgggtgttcgaacgtttcgagaagctgaacgaatatgtgcagggaaccggcttgggcttgtccatctgtaagctgaccgttgagaagtggggcggtgaaatttggatagatcctgcctatacggatggagcgcggtttgtatttacccatcccatgaatttataaggactgacaagaaataaggaaatataatgaaaagatttagttgtttttttatctggatttttgtcctgacaagcatactgcctgcgcaggaaagagaggtgaaactgaaagtcgtacagaccagtgatatacacggaaactactatccctacgactttatacgccgccgggaggcaaccggcagtctggcacgcgtgcatgctttggtgcaaaaagagcgtgagacttatggcgaaaacctgattctcttggacaatggcgacattctgcagggacagcccactgcctactactataattacatagatactgttgctccccatctgactgcagagatgatgaatttcatggggtatgatgccggtaatatgggtaaccatgatgtagagaccggtcgtgccgttttcgaccgttgggcaggtgattgccgttttccgatattgggtgccaatattgtggatattgctaccggagaaacccatttcaaaccctatgaggtgctggaacgtgacggagtgaaaattgtggttctcggtatgataactcctgccattcccgtatggctttcagagaatctgtggaaagggttgcgtttcgacgatatggaggagactgcccgcaaatggatgaagattatccgtgagcaggaaaagccggatttggttatcggtatgttccatgccggtcaggatgcccagctgatgggaggcaagtatcgcgaaaacgcttcggtggaagtggcatgcaatgtgccgggattcgatattgtcctgatgggccatgaccatgctcgcgaatgcaagagggtgtgcaacatagttggtgactcggtactggtgatggaccctgccagcaacggtgtcgttgtaagtaatgtggatataaccttgaaattgcgtgacggcaaggttgttggcaagaagatagacggcatactgtccgatacgaaagactacggtgtcagcgaagagttcatgcagcgctttgcccccgaatatgcagctgtgcagaattttgtttccaagaaaataggttcttttaccgaggccatctccacacgtcctgcctatttcggttcttccgcttttatagaccttattcatgagttgcagttggcaatcagcggagcggatatttcttttgcggctcctttgtcctatgatacggaaatccgtaaaggagacatttttgtgaacgatatgttcaatctgtataagtatgaaaatatgctttacaccatgcgtctgacgggaaaggagatacgcgatgccttggagatgtcgtatgatttgtggaccaatcggatgaagtctccggacgaccatatccttctcttccgtgagaagcgccgcgaaggtgctacggatagggcctcattcaagaatttcagcttcaacttcgattctgcggcgggtattatctacacggtggatgtgaccaagccggatggcgagaaggtagccattctcagtatggcagacggtactccgttcgatatggataaaatgtataaggtagcggtgaattcttatcgcggaaacggtggcggcgaattgctgacaaagggggccggcatctcgcaggatgaattgaaggagcgcatcatccactctacggataaggacttacgctattatctgatgcagtacattgagcagaagaaggtgattgaaccgcgtgcgctgaatcagtggaagtttattcccgaagagtgggcggctccggcttccaagcgtgattatgagttcttgtttggcaaagttaaagaataattcactatctttgcggctcaaaatctatagtataagtttttggacgtgaagcagaagaaaaaaattataggtgcattgagcttgctggtactgtttatcatgtaccaggcaagtatcactgcgttcactcacgtccattatgtgaatggggtgatgataacgcactcgcacccttttcatggcacacactctcactctcagacttcccttctggttatcgggcatctgtcggtattccactcttccggggtggatgtgtatgaggttcagcacccgatgcgtcctttgctgtccatgctcagagccaaaccggcaacgcctactgtaaagggggaagttatacgtactctttcccttcgcgctcctcccgctcttttttcatagtcattaggtttaaaaacgcctggattttttgcatgtagataccaggtgttttagtctcgaatgtccggtatttcagtgaaagaagtgcggtatgtcggattattatcttttttcagacttgaattatttttttatttagagcgctaatttgatgaaacaatacattttggcgttggtacttgcagtggtaagtgccagcgtagcttttgccgtaaatcctataaaggaaggcaatatgatttccggccatgtgatagtgaaaggtacggaggaaaatataccgtatgccacggttttgattatcggcagcggtcagggaacggtttccaatgaagaaggacaatttgagttccgcaagcttccggcgggaaaatacaagctccgtgtgtctgccgtgggctataagacccaagagaaggaagtgacggtgagcaaggactttactgccgtcatacatttcccgatggaagaggagagttttatgaccgatgaagtggtggtatctgccaaccgcaacgaggtaagccgcaaggcagctccggtagtcgtgaatgtgatgagtaccaaattgttcgagatggtcaactccaccgaccttgccaagacactgaactaccagtcgggcttgcgtgtggagaacaactgccagaactgtggtttcccccaggtgcgcatcaatggcttggaaggtccgtattcgcagatattgataaacagccgtcccatcatcagtgcattgagcggtgtgtacggattggagcaaatccccgtgaacatgattgaacgggtagaagtggtgcgtggcggaggctctgccttgtttggagctaatgctgtgggaggcaccatcaacatcataaccaaagatcccatcaacaattccttccaggtatcgagtatgttctccaatatggacggcaagtcctgggagcaatatatgggtggcaatgtatcgctggttgccaaagataactcctacggcattgccctttatgagagttaccgcaaccgtaacccctacgaccgcgatggcgatggcttttccgagctgggcaagctgaacatgaataccttcggtttccgtgcctattaccgtcctacgcatttcagccgcatcaatctggaataccatactactaacgaacttcgtcgcggaggtaataaatttgatttgcagccgcatgagacggacattaccgagcagaccaagcatatcatcaatagcggaggcgtgagctacgatttattctggaaagagtacaagcataagatttcagcttacacctccatccagcacaccgatcgcaacagttactatggtgcccaaaaggacatgaatgcctacggcaagacgaaagacttgacttgggttgccggtggcatgtatgtaggcaatatggacaactgtttctttgctcccgctaccttcaccggcggactggaatatcagaacaactccctgcatgacattatgaccggctatcatcgtgacatggagcaggatgtccgcattgccagtgctttcgtgcagaatgagtggaaaatgaatgtactgaccatgttggtcggcgcccgtctggacaagcacaacctgattgacaagcttattttcagtcctcgcgtcaacctgctctacaagccgacagatgattttcaggcacgcttgacttattctaccggtttccgtgctccgcaggcatacgatgaggacttgcacgtaacggcagtaggcggtaagggtgtccaaatcaaactgtccgacaatctgcgtgaagagcgttccaacagttacagcggttcggtagactggactgcccatttggggcactggcaggcaaacattctggtggaaggtttctatacagacctgcgccatgtctttgtgctcgaagatatcggcaagaacgaagtaggggatgttattaaggagcgccgcaacggaaacggtgcacgtgtatatggtgccaatctggatgcgaggattgcccatggtaaggaggcgcagttccaactcggatttacggcacagcgcagccgctatacccatgaggaagcttggacaaaggtggacggaaaagaccttaccactaagcgcatgccccgtacaccggattattacgggtacttcactttctcttccgcaccggtaaagaattttgatttctctctttccggcacttatacgggaaagatgattgttccgcactacgcaccggaagatgctcccgagggtgccttctgtaatatcacttcagaccgcatggagcatactccccaatttctggatctgaatgtgaagttgaactatacgtttgtgcttcacgaccatatcaagcttcagttgaatacgggtgtacagaatatctttaactgtttccagaaagacctggataaaggggaattccgcgatgcgggttatttctacggaccgacgcagccgagaaccttttttatcggtttcaagataatgaactaaaagtttccatttaagaatttttagagctaaattccgcaaaatagtcctacatttgtcgccaaagcacaaaaaacatggatactaagagaatacggaatgtagacatttcccagatacatcatttgccgatgattgatttcatcggcaatgattttgctatttttaatgacatcaaggatatgcctttgagctcttatcccacccgtttgaatgctgcttgcctgactgtctgtttgaaagggtggtgcaaactggaactcaacctgcagcaatgtgaaatgcgggaaggtatgttgggcattattcttcccgaccagattgttctgcaacgggaacgctccgaagatttttccggacttttcattgctgtttcaaaggactttatggatatggtgatacctaccatgcagcagcttttccctatgttctttatgattaaggaacggccttttgtccacatcactccggaggaatcccaatcatttcaggagtatcactcttttctttggagcaaggtgaagctgaaagacaacccttttcgtaaggaaatcactcaggggctgctgttggcccttttttatgagatatataacatttatcaaggacatgtcgttcaggaacgcattcccaaaagcaggaaggaagacttgttcgagcgctttatccgtgccgtttcagagtcctataaagaagagcgaagtgtgtcctattatgccgataagatgtttctcaccgccaagcacctctccaccgtagtgaaagaaatcagcggaaagacggcaggcgaatggattgacagtctcgtagttttggaagccaaagccttgttgaagtcttccgaaatgagcattcaggaaattgcggacgagctgcattttgccaaccagtccttctttggtaagtatttcaagcatcacactggcatgtcacctaaagaatatcgccggcaataggttcaatgtgacggaataatgtttatttttgcggtaaagatttacccccaaaataaactatcatggaaaaaagagaaattgaccttactgtttcctgctatggaaaggtgaaaggagtgaagtatgacgttgtcatcttgccgtggggagctacggagccccataatctgcatctgccttatctcactgattgtattttgccgcatgacattgctgtagacgcggctgcgctggctttgcagaattccggtgtacgctgcatggtgatgcctcccgtacctttcggtgcacacaatccggggcagcgcgaacttccgttctgcattcatacgcgctactccacccagcaggccattttggaagacatagttgcctccctctatgcacaaggcatgcgcaagctgattattctcagcggtcatggcggcaacaacttcaagggaatgattcgtgacctggcgtttgtatatcccgattttctgattatcgctgccgactggttcagcatcgtctctcccaaagactactttgaggctgctgtcgacgaccatgccggcgagtctgagacttccgtcatgatgcattaccatcccgagctggtgaatctggctgaggccggtgacggagaatcccacccgtttgccattccttccttgaatgaaaaggttggctgggctccccgccattgggataaggctacagtcgacagcggggtagggaaccccaaaaaagcttctgccgagaaaggagaacgttatatgaagccggtggtggagaagttggcgaagctctttaaggaagtcggtcagggaagtttgtattgatatacttggcttccggctatatataaaaataggcaataaccgttgtggatattgcctattttttaagtgcaccctaaaaactaatctctttactcttacaaaaactaatctttctctatttcgagtacaaaattagaaggtttttacgggttatgaattgacataagtcaaaaatctcctttggatattattttttcaaacgtgcccaaaagcctttctttttctgccggaccggttcactgttttcgcgaaacagttcttcgtaggtcagtcggtcatgtatcatgcggtaaatgcttccccagtcaggcagtccgcccaggttgcggtcatcgataaagagatcggcttttactttgcgtgaaaaaccggtgtgtgcgatgtcttcttccggatagtcccggttgacggcatagaattccacaccccgttccctgcaccattccacagcttcctccaggagcttcccttcacgtaccgaccataaaatcagccggtgacgctcgtttatcagcatcttcagcgtagcggtggcaaagggaatttcttctcctatccgggggtagcggtgttctacaatggtaccgtcaaaatcaacggctatggtcataaatgaatagcttttattggtttcagactgtggagaaaattatccttgaccgcctgtggcgccgcccttcgccgagcaaccggtcttcgtattgcttgatgaggttgggggtaagctcttcaaaggtgatggaacggttgccggtgaagcggagaaaactgttcagtgtactggtgtatatgccggaggtgctatagcgtccggtttgccttatgcttcgtatcagtgaacttgtaaatgtatatatagaagtcataatctgaattttaagttttagaattgcatataaacgcttccgggactgaaaagatttcgtcccggtggaacttttcttcaggaagaaaagaggggttttcgtataaaactcagatatgtggccttcgggcagacaggaggagggttacagtatgcccgaacgtacccggctcagtgtttcgggggtcatcagcagataggacgcaatatgcgacaaaggagcccgcttgatgacctcgggctgttgttccatgagttgggtgtagcgttcgcgtgcagtctcaaatcgccaggaatcagcctttatttgtgagacaatcagggaatattccagaatctttcggtagaacatatttatttcccatgaaatttcggtgagcgtcaacagcttgttgtacggcaacagatatacgacgctcggctcaagcgcctcaatcatgagatgggtgggttcctgcttcagagtactttcgatgcagatgatgatgcagccttcataggaaaagtgctcggtgacgtctttgccattcttataatagaattggcgcagcataccttttcctacaagtacgatattatggcttacctgcccttcattgagtaacaatgcgcctttctcgacttccttgcggatgaggattttctctatcagctttcttccttcgggagccatactcggataacgggaattgacagtggcgtctacggtttctttcaataatgcatccataagaccatgatttatttgttcggtaagcaagaccggtaaagttcggtccgcttctgctttcggggagcaaagataggacttttggaattaaaaacaatttcggatgaagcttttgtttacccatttcatgccataccaacggcggacgaaaatgaatccacggatattctcgtccaataggaaggctacccacatgccgcagatgccccatccgagggggattccgaaaaggtagcccgctcctacagccacgctccactgcactaccaggcctacatagaaaggatagttgacgtcgcctgccgcacgaagggcgttggtggcgaaaatgttgatggggcgtccaatttcgaggaggatatctataataaggatggtggcccccatgcgtatgatgtcgggattggaagtgagccagccaaagatggcatgtcccgaaagggcgaggatgcaggacagcatgacggttatcatgacggatttcttcatgacgtatttccccataaggaaggctgcgtgaggtttcttctcgcctatcagatgcccgatacagatggcgccgccctgggccatggagatgctgaacagataagcgaacatgatgatgttgacacaataggtacgggtggcgagcgcttctactcccagcatgttgatgaagtaggtgatgacgacttgcgacgagctgtacgacaattgttcgccggcggagggcaggcctaccttcatcagattctttagttctatccatgggaaagggcggaagtatgccactgggaaacggtggatgtgcttgcggaacagtatgacgaacaggataatcatggagacgccccggctgaaggctgtagagatggcagcgccttctacgcccagttccggaaagccgaagcggccgaagatgagggagtagttgccgatgatgttgaggatgttgaccacaacggtgaccatcatcgggtagatggctttgttggcgctgcgcagggaggcggagagagtgagggataatgcctggaagaaggcgaaagcgcctacgatacgcatatagtccgtgccgtcctgcatcaattcggcggtgaggcccatcagccggaggatgggacgggcgcaggagaacagtaccaggctgaccgtgatacctaccgccaggttgacgaggatggatacgccgaccacttgcactactttcttgtgtagtttcgcaccgagatactgggaacacagaacggacgttccgagattgatgacttcgaaaacgaggaaagtgagcatgataatctggttgactacccctacggcggcaacactgttgtccgagtggcggctcagcatgatggtgtccaccgcaccgagcatcatgatgagaagtgtctctataaagatgggggcggccagcttggcaagccgctttttcaggctttcttgttgtatcattgtccgtgtatgtgcactatactttaaaaatcgcgcaaagataaggaaaggttgaaaaggacggtttgatatgtatcaaattttttttcttgttttagggtttgagtgttaacgtgttatctcaaattgcatgaaaacggtgaaaaaaatatgtaggaaagatttgcacagtccaaaagtttgccctacatttgcaccgcatttgaaaagaatgctggttataaaaaggaagtttgggtgagtggctgaaaccaccagtttgctaaactgacgtacgggtaaccgtaccgggggttcgaatcccccagcttccgccagatgcactcttagctcagttggtagagcaactgactcttaatcagtgggtccagggttcgaatccctgagggtgtacaagacaaatgcgagggtgggttcatctaacggttaggatacatgcctctcacgcatggtatacgagttcgattctcgtacccactacaaaaacaagaaagcggttgactgatgaaacggttgaccgctttttgttttttatttttctgttgtaatccgaaaatagtttctatatttgcacccgctatggcgaaatgtatattctatatcttgttagggttgttcctcatatcgaagttcacttccgtttctgatgatatggagggatgtaagacactccctaccgcggatgtgcattatttctccggaacccggtacaacttgtcgggggcagatggcagacaatgccagggaaaaggggaggacgcgaattacaattgcctggcagatgccggttgcataggaaataccttctcattgcggcatgtctcttgctcgaaattattgaggcttaatcctgacttcattgctgtcaaggtcgcgagaaccctgaaaactctgcttccggaagaaaagacaacttctttcccttttactttccatcctcataagatttcatatagatattatgtatatacgctgaggcgtattcttatttagtgcttttccccctctctttcgggagccggagagatttcccgtctccccatgccgagtttttctctatttttaagtactgataatcaatatataatggaatttctattggattttattctccatattgatcagtatatgattgatatagtgcaggaatatcatatgtgggcgtatgtcatattgtttctgctgattgtggtcattattatgatttccatactgccggccgtggtagaagtgctgcgtgcaagactgaaacaatgaaaacaaaaataaattaatatacttagtacatttttatccgttatgaagaattctttttttagccggttcacaccgaaagaaccgaaattctttcctttgctgaagcaattgtctgagattttattgtcctcgtcggctctgttgatagaaatattgggccatgactcgcctgagaagagggcggaagattataaacgaatcaaagatttggagcgcgagggcgataagctgaccaatctgattctggatgaactgggcactactttcattactccttttgaccgggaggatatccacgacctggcttcgggcatggatgatgtgattgatggaataaacagctgtgccaagcgtatcactatctataatccgcatcctatttcggacaaggggaaagagctgggacatatggtccaacaggaagcggccctcattgaccaggccatggatgaactggaagcattccgcaagagtccggataagctgcgcgcatactgcaaccaaatgcatgacatagaaaaccgggcggatgatgtctatgaattcttcatcaccaggctttttgaagaagagaaggactgcattgaactcatcaaaatcaaggagattatgtatgagctggagaaaacgacggatgcagccgaacacgtgggcaagattttgaggagcctgattgtgaaatacgcataaacggacggatgtatggaactattagtgattatcattgtgctggctctgatattcgattatatcaacggttttcatgatgcggccaattctattgccaccattgtgtctaccaaagtgcttacaccgtttcaggcggtgatatgggcggctttcttcaattttgtggccttttttatcgccaagtgtgtcatcggcggtttcggcattgccaacaccgtatcgaaaacggtgatggagccttacattactttgcctatcattctggccggtgtgattgcagccattgcctggaatctgtttacttggtggaaggggattccttcctcttcttcgcacacgcttatcggaggttttgccggagctgccatcatggcacacggttttgaggccatccagctgagtatcattctgaagattgcggcattcatttttctggctcccttgattggtatggtggtggcattcggttttacgttgttggtcttgtatatttgccgcagggcgcatcctcatacggccgagttgtggttcaagaaactgcagctggtgtcttcggctttgttcagcatcgggcacggtctgaatgattcacagaaggtgatgggtatcattgctgcggccatgatagccgggcattcggaaggattgggaatggggataaacagtattgatgacctgccggactgggtggcattctcttgttttacggccatttcactcggtaccatgtccggtgggtggaagattgtgaagaccatgggaaccaaaattacgaaggtgacgccgctggaaggggtggttgcggaaactgccggtgcgtttacactctatctgacggagtatctgaagattccggtgagtacgacacacaccattacgggagccattatcggggtaggggccacgaagcggctttcggccgtacgctggggagttacgaagagtctgatgaccgcctgggtgctgactatccccgtcagtgctttgctggcagcagggatttattgtatcgtatctcttttttagaagtgctgccgcataaaaaatagacgggttcgttttattttgcattaggtttgcactatctttgcagcttgaaactgtaaaatagaatgcacattggactggctatatagtttattcgttgaacactccgccttgcaggcggttgtggtactctcgttgatttccgctatcggattgggattgggaaagatacatgtttgcggcatttcattgggagtgacgtttgtattctttgccggcatcattgccgggcatttcgggttgtccatagacccgcagatgctgaattatgcggaaagcttcgggctggtgatatttgtgtatgctttgggcttgcaggtgggaccgggctttttcagttctttccgtaaaggaggggtacagctgaatatgctcgccacgggtgtagtgctcatcggcaccctgctgactgtagtgggcagctatggattgggagtatccctgccggatatggtgggcatactttgcggtgccacgacaaatacaccggcactcggtgcggcacagcagacattgaaacagatgggattggagaccagtacacctgctttggggtgtgcggtggcatatccgctgggggtggtaggggtcattctggccgtactgttcatccgtaagacgctggcgcataaggaagacctggaattgaaagagaaggatgatgtgaacaagccttatattgttgcgttccaggtgcacaatcctgccatcttcaacaagagtatcaaggaaataggcgggctgaacagctatccgaagtttgtgatttcccgcttgtggcgggatgggaatgtgagtattcctacttcggaaaagattataaaggaaggtgaccgcctgctggtgattacctcggagaaaaatacaccggcactgaccgtgctcttcggcgagcaggagcataccgactggaacaaggaagatatagactggaatgccattgacagccagctgatttcgcaacgtatcgtggtgacacgtccggagctgaacggcaagaagctgggctctctccatctgcgtaatcattacggtatcaatatcagccgggtttatcgcagtggcgtgcagttgttggccacagcggaactgaccttgcaattgggtgaccgcctgaccgtagtgggcgaagccgctgccatacaaaatgtggagaaggtgctgggcaatgcagtgaaaagcctgaaggaaccgaacctggtggcggtatttatcggcattgtcatcggtctggctttgggagcgattcctatttccattcccggcatcagcgctcccgtacggctcggattggcaggaggtcctatcatcgtaggtattcttatcgggacattcggtccgaggatgcacatggtgacttatactacgcgcagtgcgaacctgatgctccgcgcattggggttgtctctttatctggcttgcctgggactggatgcaggtgcccatttcttcgatacggtattccggccggaaggactgttatggattgccataggttttgcgctgactgtggttccggtattgattatgggtatcgttaccttcaagtggctgaagatagatttcggaacaatggcaggtatgctgtgcggaagcatggcaaaccccatggcgctgaactacgccaacgacaccatcccgggagacaatccgtctgtagcgtacgctacggtctatccgctgtgtatgtttctacgggtaatcatagcccaagtgctgctcatgttcttcattaatggataatggggaatggagggcactattaattatcaactatcaattattcaattaaataactatgggaaatataactccggaaagtattgtcaatgacttgcgttatttgcaattattatcacgcagttttcctaccattgctgatgccagtacagaaatcatcaatctggaggccattctgaatctgccgaaaggtacagagcattttctgacggatattcatggcgagtatgaggcttttcagcatgtgctgaagaatgcatcgggggcagtgaaacgtaaggtgaacgaaatattcgggcatacactgcgcgaaagtgagaagaaggaaatctgtacgttaatttattatccggaagagaagctgcaacttatcaaggagcaggaaacggacctggatgactggtatttgataacactgaaccagttggtaaaagtatgccagaacgtttcgtccaaatatacccgctcgaaagtacgcaaggcacttccagcagagttctcgtatatcattcaagagctgttgcacgaatcgagcatcgaacctaacaaacatgcctatatcaatgtcataatcagtaccattatctctacgaagcgtgcggatgattttattgtggcgatgtgcaaccttatccagcgcttgaccatcgactcgctgcatatcgtgggcgatatatacgaccgcggaccgggtgcgcatattatcatggatactctctgtgattatcataatttcgacatccaatggggtaaccacgatattctgtggatgggtgccgcatcgggtaatgatgcttgtatagccaacgtaatccgtatgtcgatgcgctatgctaatttagcaacgctggaggatggttatggcatcaatctgttgccgcttgcaacgtttgccatggatacctatgcggatgacccttgcaccatctttgcaccgaaaatgaactttgccgatgcggaatacaatgagaagaccttgcggctgattacacagatgcataaggcgattacggttatccagttgaaactggaagcggaaatcatcagccgtcgtcctgagttcggtatggagaaccggaaactgctgcatctggtggatttcgagcgtggtgtgtttgtatacgaaggcaaggaatatccgttgcgcgatgtgaatttccccaccgtagacccggcggacccgtatcgtctgtcggacgaagagcgcgaactgatgcaccggattcattcttctttcatgaacagcgagaagatgaagaagcacatgcgctgcttgtttacgtatggcggcatgtatctggtgtgcaacagtaacctgctttatcatgcttccgtgcctctgaatgcggacggcagttttaaacatgtccgcatcggccaaaaggaatactggggacgtaagttgctgaaaaagaccgaccagctgatacgtaccgcttactttgacgaggacggttcggacgagaaacagtttgcactggattatgtctggtacatgtggtgcggaccggatgccccttccttcgataaagacaagatggctacctttgaacgctattttgtggccgacaaaacattgcataaggagacgaaagggcattactatgctttgcgcaacgaggctgaggtgtgtgaccgcattcttgaagagttcggcgtgaagccggggccacattcgcatatcatcaacggacatgtaccggtaaagaccattaaaggtgagaaacccatcaaagcggatggtaagctgctggtgattgacggtggtttttcaaaagcctatcagccggaaacgggaattgcgggatatacgctggtatatcattcccacggcttgcagttggtgcagcatgagccgttccagagccgtcagaaagccattgaagaagggcaagacatcaagtctacaaccctggttgtcgaattcaattcgcagcgtatgatggtgaaggatacggataaaggaagtgaactcgttacgcagattcaggatttgatgaaactgctggtggcgtataggacggggctgattaaggagaaacaataatttataatttcagtatcgtcaccccgccctctacaatgattcctttgtcataggttttcccttgggtgtagtagcggctgccgccataaccgccggtgaggaatatgccaaagcgctcggtcaggtggtattccagattgacacgtgcctggagggcatagagacgtgccggaatgccgtagtccttgttcttgaaggtttctatatgttggtatcccagatctccgctgatgaacagctgtttgtagagcggtaattcaagaccggcacggtagaagagggaagcggaaaacttatcgccgaaatccagatactgggtaccgccgccgaggatggtatagaagagccggttcttgaaacgggcacctacattcagcttggtggcattaccaccgaaaaacatcagttgaacttttgtttggggattggcattgactaatcccaactggaagccgtctaatttttctttgtagtagttgaatagacctatttgaagccctttggcgcgtatagccatattggcagcacctatttgtaatcctcgggctgtaccacccaccacattgcccaggccggaaacctgaacaccggtcatatctccggcagtgatgttggcaagggcagacatctgcatgccattcaagtcttcaccgattacgcttagcaggccggctcctgaaaatcctttgaaatttccaccggaaatattggcgagtccggcaaagtgtatgccggaagcaccttctccgctgatattcaacaagccgcctatggaggcgccacgattatagtccccactgatgtttgccagaccggaaataatgatgccttgcgcatgatttccgttgatacctaccagtcccgaaacggatactccgataaggttgttaccattgatgttggtaattcctgctatctgcacgcctcgcatgcttccccccaccatatttgacagacctgccatctgtacaccgttcacatccctgccggttacactgccaagaatattcatgccgagaccattcagacggttcatggaggagaacacacccagattgaagcaggtgcttcctacggtgtcagtccgctgtgtggagatgtttttccataaggagatattgatacctaccgggccatggtctgttcgtggagagtgttgtttccggaaagtattttcggaggatttctgaatcgtgtccggctgtacgctgcccggattatgttcttgggcaagagttgtccctgcaatgagcagggatgtaaagaagaataaaaggagttgtttcatattggttgaaccctattggctttatcctttggcctcctgatacaagaagcgcttgatagatttcttcggcgttttttcaaattcttcaggatagattttcattttgaatatctggctgtatgcgggcagttctgcattcagtgccacacggttttcctccatgacgcgttcgatgtcgtcattgttcagcccatgggcaaaggcatcatcgaagtcgggataaaccagacctaccagtttctcgttctgctgcacgatgatgctttcggctacgtacggcatattgttcagtttgtcttctatctcttccgggtagatattctgaccgctcgggccgaggagcatgttcttgctgcgtcccttgatgctaatgttgccttcggcatccatcagggcaaggtctccggtgtgcagccagccgtctttgtcgagtacctgcacggtggcttcgtcgttcttgtagtaacccagcatgacattgggaccacggcagacaatctctcccggaatgttttcgggatcggatgataggattttcacctccatacgcggtgcggcctttccgcaagaaccgggtttgaagcgggtccaatcctcgtaacagataatggggccgcattccgtcattccatagcctaccgtataggggaaatctatcatctttaagaactgctccacttcctggttgaaggcagctcctcctacaatgatttctgtaaagtttccgccaaaggcttgaatcatctggtcgcgtacggtcgcttttatcttgtcgttaatgatgggtactttcagcaacagcttcatggcgggagtttccagcttgggcagtacactcttctttataatcttttcgataatgagcggaacagccacaatcaggttaggcttcacttcggtgaaagcctggaaaatgattttggggctgggcatgcgagtgaggaagaatatgtggcaacctacggcgaattcatacagaaactcgaatgcaagtccgtacatatgtgccattggcagcatggagacaatcttgtcaccggctttcagcggcaatacttcgaaagcaaaagtggtgtttgaccaaaggctgcggtagggcagcatcactcctttggagtaactggtggtgccggatgtatagttgatgaccgccagttcgtcgggctggtctttgtgataactgacatgttccttgcggaagttcttggggtatttcttaccgaacatttcgttgagatgttcgcgggcatagtccaacttttcgctgcgggagacaagaatgtagaagtctgccatcatcatgatgccctccagcagcggcatggcactttcgttgaggttttcccaaacctggtcgcctacgaaaagcagtttggcttcggaatggttcacgatgttgtgtacattgtctgccttgaactcgtgaaggatggggacgattaccgcaccgtaggtcaatgtcgcgaggaatgttacgccccagtgggaactgttgcggccacagacggcaatcttatcgcctttcttgatgccgcttgcctcgaaaatgatatgcaacttttctattttgcgggctacgtccttatattgtagggttgctcccttgtagtcggtcagagcgtctaaatcccaattttcctttatgctattctctatataggcgataaaactttgttccatgatatttaattgcacatttgattgaaaattgtgcaaatataagggtttatatatagaaagcaaacttttataaggaaaatagtttttatggcggctatttgctaaaactcgacagttatacctaaagtaggcaggatagtgccgctttcctgcttgaggtatttcattttatagcgctgttcggcaacaggagcggacggattttcgatgatgcccgtactcattatcacatccggctgtttcagtttgttgccggtgatattctgtatgtccaggtagattcctatcatgcagtgatggaagtagaaggacttgtccacacgcaagtctaactgggcaaagttgggcagccgcccggtattatagtacgcatagtcgtagtagggctgtcctttggcatcccatgcttctacgagtgatgatttgtcttcatcatagggagtgtaggggctgccgcctatatagcttagcttgcctcctatgctccagcgccggggcaggttgtatgtaccgctcatgttgagtatgaaacggttgtcccaggcagatggaatgaagtcttcatttgaacggttgcggtattcgctgcggtataaggtgaaggaggatacgagattgaacttgccggatgcctgccagcggaacatggtttccagtccgtaggccctgccgctggctgtagggacgagtgcttcattgccggtgacaccgtaatcgtttcctttgcatgccaacggaatgttgtcttgaagggaaagtggcatacggctgtaacgcttgaagaaaccttctgcagaaaccatgaaccggtcttgcaggtgccagtccagaccgaggctactttcaaagacctgcatgtacttcaggcctttgttgagatattgctcttcattgtctttatatcccaaagcggtgtagggaggcaattggtggtagaggccggtacttccgctcagggtccattgttccgagagtttgtaggatgcagagaggcgtggggagaactgtttccatagctgccgcatctttcggttgtaagtgttgccgtccatacggataccggcggaaagggcgagacgcttgtcggcggtggtatagtcggaagagaagaaagcaccccagccgaagatgttgagtgaggtttcgtagatggaaagcgtacccgaatgactgccgtatagtctttgccggctgtggtttgtatagatggagttgttcagttctgctccttcttttagggtccatgctcccaagcgcgtctggttttcaaaacgcagggtggtcttttgctctgtggagcgtaggcgcagggtcaggttgtcttcggaagagtcatcgttgttgcggtatttcagattgcggttgttcaggtagttatggctcagtataagggattgcacgtgtcttccattgtagtgtctgtaagaggctccgagagtgaatgtttcctgatggatggtggggagatagctgagcagatattcggcatcttctcctttttcatcggtattcagtttcatcttgtcaatgcctacgagaccaagcagggtcagctcgctgtgcttgttgaaacgggtttttgttttgaattgtccgtcaatgaaattgggcaggaagggcagtcccaaagccttgaacaaaagttgcaggtaggactggcgtgcagagaacagataagtggtgcgttgtcccaggtgtcctgctccgctgagcgagacttctgatgcaccgatggtggctttgaacgcctgcttgtccggattgccgtccttgaggcggaagtcgaggacggaactcaaggctccggagcggttggcggggaaggcgcccgtataaaatgtaatctcgcgtatcaggtcggcattgacaatgcttaccggtcctccggatgcaccttgagtggcaaagtggttgatgttgggaatttcgatgccatccatataaaagcggttttcggaaggagaaccgccccgaacaatcaagtcgtttcgatagccgatgggagagaaagagacaccgggataggagcgtacgatgcgcgagacatcccggttggctccgggacttttctctatttcctgcaggccgatgatacgcatgctgaccgggctttcgatacttcgccggaagggggaaggcatcaccactactgtgttcagcagattggcatcctcttccatctctatctcaatgaacggagttgaggctgaaacgatatattcgggggtggaaacagtctggtatcctatgcaggatgcctcaaggctataaatgcctggaggcacctgctctatcttgaatgtgccgagtgaatcggtggaagcccctttcccggggataccggcaacgaaaacgttggcgtaggccacgggttgtctggactgtctgtcgatgactttgccgcgaacggaataggtcacgggaaccatcatggcatgtacggttgggctgatacctgataaaagtatcagcaatataaacaatatagctcccaccttgtgccgcatgacattcatggctaatcagacgtcactaattactttcccaagtaccatcggtacatgcgttgcacaccttcctcgatatcaatcttatgatgccatcccaatgcatgtaacttgccgggatcggtcagtttgcgcatggtgccgtcgggtttggaagtgtcgaaggtcagccggccttgataacctacggtgttgacaatcagttctgccaactggcggatagtgatttccttgcccgtaccgatattgatgtggcagttgcggatttccttgtcgtccggcttgaaggtatctttgaagtcgacgtgttccatgacgaagacgctggcatctgccatctcctcgctccagaggaattcgcgcaagggggtgccggtaccccataatctcacttcttcttcgctgatgccgtatttccggaggatattcagaatgtcctctttgctgctgtcgccgttgatgccttctaccggacgcaggttcatgtcgtggcgtacggcattccagtcgccttgtttcaggcagtgggcaaggtgtatcttgcgtatcatggcggggagcacgtggctgcgttccaggtcgaagttgtcgttggggccgtaaaggttggtgggcatcacggcaatgtagttcgtaccatattgaagattgaagctttcgcacattttcagtccagctattttggcgatggcatagggctcgttcgtgtattccagcggagaagtgaggagtgcgtcttcttgcatcggctgttcggcattacggggataaatgcaagtactgccaagaaagagaagttttttcactccgtggcggaagctttcaccgatgacgttctgctgtatctgcaggttcttgtagatgaaatcggcacggtagatactgttggccataatgccacccacaaaggcggcggcaaggaatacatattcgggctgctcctcatcgaagaagcggcgtacagcaactccgtcgagcagatcgagttctttgtgggtcttgccgatgagattggtgtatcctttctcctgaagatttttccagatggcagaacctaccagtccccggtggcctgctacatatattttggcatttttgtctaacattattgtctgaaagtttaatagttcattcaaagctctttgcttcttaaatacagtttcttcacaaatttcatgtcgtgctctgccatgatgcgtaccaactcttcaaaactggtctgcctcggattccatcccagcagtgtttttgctttggtggggtcgcccagcaattgttccacttcggcaggccggaaatatttggggtcgacttccacgaggacttttccggtctgtgtgtcgatacccttctcatccactccctggccttcccagcgcagagtgatgcctacctcccggaatgccagtgtcgcaaattcgcgtacggtatgcatttctccggtggcaatgacgaagtcttcgggggtgtcgtgctgcaggatgagccacatgcactcgatgtagtctttggcatatccccagtcgcgccgggcatccagattgcccagatacagcttgtcctggaagccttgggcgatgcgggcagccgccagtgtgatttttcttgtcacgaaggtttcacctcggcgttcgctctcgtggttgaagagtatgccgtttacagcaaacatgccatagctttcgcggtagttctttgtaatccaaaagccatattgtttggctacgccataaggactgcggggatagaacggggttgtctcgctttgcggcacttcctgtacttttccgaaaagctcggaagtggaggcctggtaaatgcgtgtcttcttttccataccgagaatgcgtacggcttcgagcatgcgcagggtgcctacggcatcggtttcggcggtatattcgggcacgtcgaaggatactttgacatggctttgggcggcaaggttatatatttcgtccggctgcacactctggatgatacggatgagagagctggagtctgtcatgtctccatagtgcaggttaatggtacgtttctgtttcatgtcgcgtacccactcatcgaagtagaggtgttcgatgcggccggtgttgaaagaggaagagcgacgcaggataccgtgcacttcatatcctttctgcaggaggaattcggcaaggaacgagccgtcctgcccggtaatgccggagataagggctttcttcataatgtatgctttttgttattatgtcttttcggactgcaatattcgttattttccacgagatggcaaaatataaactatttctttcccatcactttgtcgataatcagtgcgattgccccgtcgcccgtcacattgcaggcagtgccgaagctgtccatcgctatgtatagtgcgatcatcagcgcttgtgccgactcgtcgaagcccagcatggattgcaggatgcccagtgatgccatgatggcgcctcccggtaccccgggagcggccaccatagtgatgcccagcatgaagatgaatcctgcaaatagagggaaatcatggggcatgccttgcattatcatcagtgccagggcgcatgccacaatcttcaatgtgctgcccgacagatggatggtggcgcaaagtgggatgacgaatccggcaatatcggcagagacgccgttcttccgactctgctccaatgttacggggatagtggcggcactggattgagtgcccaaagccgtgaagtaggcaggtatcatccgtcccagtagtttgagagggttcttgcggacaaacagtgccgcaatgctgtattggaataccaggagaaagatgtgaagcaggaagattacaccgataatcttaataaagaccatcaagatgccgaatacttgtccactgtgcgtcatgttgaggaaaatgccgaaaatatagatgggaagcagcggcaatatcactgcactgatcatgcggatgacaatctcttgaaaatcgcgtgccgcatttttcagtacctcacttttcagatgagccagacccagccccagtgtgaaggcaagtacgagtgcggtcataacattcatcaagggcgggatgcccacggaaaaatagggaagaatgccttgagattcactgactttttctaacggtaccccggtttctatgagggaaggaaataccgccataccggtgaagtaggagagaaaaccggagaatagagtagctccgtaagcaatgagtgccgtaacgaccagcatccgtccggctcctttgccgatgtcagcaatggcaatcgtgaccagtcccacaatgatgagggggatggagaagttcaggaattcactgaaaatggcattgaaggttacgaacagccgtaccagcgaagccggtaggaaatttccgaaaagtatacctaagataatggcaatgatgatgcgtggcaataatccgatgtggaagttcttcatgagcattggttttctttctggttgaaaaataggctttcgctgacaaaagtactattttattttcgtaattcatacgaacaaatgctgttagcattttgtttccatataaagacaaaatttacatgaatatgaagaatttaaataaaacagacattggacttatcggtctggcagttatgggcgagaatttggccctcaatatggcagataagggatggaatgtttcggtatataatcgtacggttccgggagtggaagaaggggtggtggaacgttttgtgaacggccgcgccaaagggaaaaaaattgaaggctatacagatatagccgaatttgtaatttccattgccataccccgcaaaataatgatgatggttcgtgctggcagtgcggtggatgagctgatggaacagctgtttccccatttgtccgaaggggatatcctgattgacggtggcaattccaattatgaggacaccaaccggcgtgtggcattggccgaaaagaaaggcttccgttttgtgggagccggagtttccggtggagaggaaggagcactgaacggcgcgtctatcatgcccggaggctctgaaagtgcctggcctgaggtgaagcctatcctgcagagtattgcggcaaaagcatctgacggtactccgtgctgccagtggattggtcctgccggttccggtcatttcgtcaagatgatacataacggtatcgaatatggagatatgcagcttattgccgaagcttattgggtgatgaagaatctgctgggtctggacaatggacagatggcggaaatctttgctgattggaatgagggcaagttgcgtagctatctcattgaaattaccgtcaacatactgcgtcataaggacaaatcagaaggttacctgatagataagatattggatactgccggacagaaaggtacgggcaagtggtccgttatcaatgcgatggagctgggcatgccgctggggttgattgctacggctgtgttcgaacgtagtttgtcggcacagaagggcttgcgtgaaacggcttccaagcaatttgtatgccgacgctcgcaggcagtgtacaacaagtcggagatggtgaaggatatctattccgcactctatgcttccaaattggtgtcatatgctcagggatttgctgtgttgcagcgtgcatccgacgcttttgcctggaacctcgatttggcatccatcgcccgcatgtggcggggtggctgcatcatccgtagtattttcctgaacgacatagctacggctttcgaggctaaagacaagcccaaacatctgctgttggcaccttatttcaaaaatgaaatgcagctgctgctttccggctggaaacatctggtggcacaatccatgaaagaggaacttccggtacctgcattctcgtccgccttgaattatttctattcgctggtgtctgccaagttgcctgccaatatgattcaggcgcaacgtgactattttggtgcgcatacctttgaaaggacagacgagttgcgtggacagtttttccatgaaaattggacgggacacggaggagatacgaaatcgggtacatacaatgtgtgagaaaggggagaagatgatgaagaaattagtgattgttatattcggtgcttcgggtgacttgacgaagcgcaaactgatgccggcgctctatactttatatagtggcgggcggttgccggaaggattctccattctggggataggacgcaccgagtatacggatgcccgttaccaagaatatataatgggtgaattgggtaagtttgtagcttccaaagagcaggtggaagataaaatgaaggatttttgcagccatctgcattaccagactttggaccctgccgaggttgaaggctatcatctgctggacggacgtttacaagagtttaccggtgagaagaaaccggacaacctgctgttctatctggctactccaccttccttgtacggtgtcattcccttgcacttgaaggcggccggtctgaaccgtcctgatacgcgtatcatcgttgaaaagccgttcggttacgatttggagtcggccagaaagctgaatagcatttatgcttccgttttcaaggagcatcagatttatcgcatcgaccattttctgggtaaggaaacggcgcagaacattctcgccttccgttttgccaacggaatcttcgaaccgctatggaaccgtaattatatagactatgtggagattacagccgtagagaatttgggtatcgaaggacgtggcggattctatgaaggtgccggagccctgcgcgatatggtacaaaaccacctcatacagcttgtggcgctcactgcattggaaccgcctgccgttttcaatgccgataatttccgcaacgaggtggtgaaggtctatgagtcattggcccccttgaaagaggaggatttggaggaacacattgtccgcggacaatatacggcttcgggctcgaaagccgggtatagggaagagaagaacgtggcacctaattcgcgtaccgaaacgtatattgccatgaaaatcggtattaacaactggcggtggaagggtgttcctttctatatccgtaccggcaaacaaatgccgacaaaggtgactgagattgttgtacatttccgtgagacgccccatcagatgttccgttgcgagggtggacattgtccccgcgcgaataagctgattctccgcctgcaacccaatgaaggcattgtgctgaaattcggcatgaagactcccggaccgggatttgacgtgaagcaggtgatgatggacttcagttatgaccagttgggcgggttgcctaccggcgatgcctatgcccgtctgatagaggactgcatacaaggtgatcctacactctttacccgcagtgacgcggtagaggcttcatggcgctttttcgatcccgtgttgcgttattggaaagagcatacggatgctcctttatatgggtatcccgtaggtacgtggggacctttggaaagtgaagcaatgatgcacgaacatggtgctgagtggaccaatccgtgtaagaatttgactaatacagatgaatattgcgagttatgaaaagttatgtttaccattcggctacagctacggcgcatgcgttgattgaacatttgattgcgatgatggagcgtgaaccggaaaagaccttttattttgcattcagtgggggaagtactccttcgctgatgtttgacatttgggctaacgaatacaaggaggtgactccttggatgcggatgcggatttattgggtggacgaacggtgtgtgccggcagaggattatgagagcaattatggtaccatgcgccgtttgctgttggatgaagtaggcatgcccgatgaatacgtttaccctatttatggagtgaaccgcccggagattgaagcaaagaactattcgacgctggtttgccgcacggttccgctttggggtggcttcccggccttcgatgtcgttttgctcggtgctggagacgacgggcatacctcctctatctttccggggcaggagtatctgctttcttcctttcatccttatgaggtgagtgtcaatccctataatgggcagaaacgcatagccatgaccggctgccttttgtttgctgcgaagaatcttattttctttgttaccggcaagaataaggcggatgtggtccgcgatattcttgattccggggataccggtccggcagcttatgtggcccaccatgccgagcgtgtggaattgttcctcgatgctcaggccaatggcgggaaaatgtttacttagatgtgccgctctccagaatgcttacgatggagaataatgtaaagcagatgcctcccaaaccagccagtacacgtgcaggtacaaaataggcattgtgcaggtttgccatctcaaacagaaaggcggagagaaacagacaagccagggctgtgaagaccggaatcagcgggatgcggttggccagcttgaaagtgttccgccagatggcggcaagcaggatgactttgctggaaatgctgtagcataccagtcccagacctatcataatatatcctgtggaggagagtgccggattgctgttggctaagaccagaagtccccagagaatgctgatgctgcccattatcaaaacaagggctggccaccgtttccgctcagcctttgtatagttgttgcgtatctggcggacgatggttgcaaccagcgccaccaggctggaacagatacaagcaagtcctgccatgacatggcctgctacataatatgcattgtgcccgctgctttttgacaatagccagaaggcccatatccatgccattactgccataagggtggcaactgctattaggatatatccctgggaggaattgaatgcatcggcaggttgtagctggtcggtacgttccgagttggcgggaatgagggtgaagcgggtggaggctgtggctgtggtagctacacaagctgtgatgaaaccgactccgcaaatcacgtgtcctgctacgaaattgcttgccgtggcagcttcgtgcatataattccaaccatagattactgtgagtatggctgccaggtaaccgataaccggaagtgcgtatctggctatcggattgtaggtatgaataatttgtctaatgattgttgccgctgtggcgaacaaggcaatgcaaatcatccctaaggaaaatactaccggaccggccacaaattttgccgagtccactccttcgtggagcacaaaggctccgtagccgaaacagaaaagggccatcaacaagggtatggccctgaaaagaatactgataccgtaattcataactgttgtttttagagtttccccttcaaacagcgtttctgcggctttgttcctccttttaagatttatttgtgatgagaagtgcttgtctgtccgtatttagggagccagcctctcctttttccagctgccatccgcttgttgggaatagaggaaacggtcgtgtagcctgctttcccgtccttgccagaattcaaaacggaaaggggtgacggcaaaacctccccagttgtcgggacgtttgatactttgccctacccatgttgccgcttcgcggacgaacgcgcgcattatctccatacggctgccaatgacgtgactttggggtgaaatcctcgccccgattttacttttgtaaggtctgcttgcaaaataggtgtcagaatcggcaggagcgcatctttcagcttttccttcaatgtgtatttgcctttccagtttgtgccatacgaaagataaggatatatacggatttgcagtcagttgccggcctttcctgctttcgtagttggtgaagaagatgaaccggccattttccacccctttcagcaacactgtgcgtgtagagggatgcccgtctgtcgaggctgtagctaccgtcatggcggtgggctcgtactcatcactatggatagcatcgttcagccaatggtcgaattgctcaaggggattgtcgttgaggttacccggcgtcagtctgcctttcttatattctcttctgatgtcaaagagttgtgatttcattatcgtgtggttttatcaagaatgatgtttttctatgtaacagtctgagagggctgaatgtttttgtttctctgcggaaagaaaatatggaagaaggaaatggttgtgttgatacttaaaaaaatggcatcccgattgtggtggctatcgggatgccggatattggagattactttatggagacaagtgggaagtggacactggcatgtctgctattgcaatttaaacattacgggaactgtgaatttacaacggaccggtttgcctcgttgctcaccgggtttccatttgggcatggtggaaatcacacggatagcttctttatccaggtagggatctacgcctcttactacttttacatctacgatgctgccgtctttgttgacaacgaattgtactattacgcgcccttgggttccggtttcttgtgcaatagtcgggtattttatgctcttacccagatattgcatcagactcatgccattataagaaaactcaggattcttctctacaacttcaaaaatctcgtcctctaccggaatctcttcatctacggttggagatatgggtttgatgattacagcttcaccgatttcttcggaagaggcaatggctgtttctttcacattgtcattatcatccacaattgtcaatacctcggcaattgcaggagcttgagtgggtggcggagctgctaattcgggttgctccgtgataggaatttcaatttcctgctcaaatacgttctcggtaatagcaccgctcatgtcaatcataacatcacgcttcgaccattcaaatgcaacgaacatgaagaccagcacaattacataacctacaagtagccaatttgacttcttgttttccaggcttgctttggatgttttcttgatttccataatttataagattattactgtataatggttgtcgcgaaactaatattatacagatgtgattagtaaaatcataaaacatgcgtgcccacttgtttctgcattaaagataagaaaatgaatgttatgttgttgtttgatatatggttatatatagttttttaaatttgctttgataatttttccgcttatgaattaaatagtgttgaggtgcaaaaaagcgcttccaatgttcgcttatggagaaaggcttcacacaaaaacaaattgtatttatagtattgaaatgcggttatagcttttgtatcaattctttagtatgttggttggaatcagatgctggcaataaatatagattatatatgatagccatttgaatttgactatctttgtacgctgaatttaaccctattttataatcttattttatttatacggaaatgattttgtttttattgaacacgtctgccgctggaggtaaacttgaacaggcattggaaaaattggtggattttggtatggatgccggtaaggatatattaatcgctattttaatctatgtaatcgggcgtttcatcatcaaacagataagtgcattagtagccaggatacttgaaaaacggaagattgaaaccagtgtacagacctttttgaagagtctgataaagatactgctgaacatgattcttgcttttgccataatcggcaaactcggtgtggagaccaccagttttgcggcgttactcgcatctgccggtgtagctgtgggtatggcgctgtccggtaatctctcaaattttgccggtggactgattatacttattttcaaaccgtttaaagtaggtgactacatagacggtccgggagtaagtggtacgataaaggaaatacagatatttcacactatactttccactcttgataaccgcatgatttatgtacctaatggaagtctcagtggtaatgccgtcactaattacagtaagcaggacaagcgtcgtgttgaatgggtattcggtgttgaatacggtgaggatgtaaagagagtcagagccgttttacagcgcataatcaatgcagacagccgtatattggatacaccggctccccttattgtcttaggttcattgagtgcaagcagcatcgatattacagtccgtgtctgggtaaaaagtgtggactactggaatgtgctgtatgatatcaatgaaatagtttatactacatttaatgaagaaggaataggatttcccttcccgcagctcactctacatcacgcaaaagattgagcttattatctataacagtttccatttatcaagaatttgaagctttatgtttgctctgaaaagtatgctatactgttcattaattccgaaaaagaaatcataaactccttttgtttgcttttaaacattatcggttgctaatttattgaagctttatatatagatttgcaagtatttcttaattaggatatgatataaaaagattattttaactgtttcagcttttatagctgttagtggtgtttatgacaaaaaagcggtagaaggttttgacaagaataacaacctaatatttttttaatttgtaattatgatgaaaaaaagtttcttgactgttctatttgcgctgttctgcacgatgggatttgcgcaattgtctttcaatgtaaaggccggtcttaatctcagcagttacatcggtgaaaactctgaccattccaaatttaaaccaggagcacgcattggagtgggaatggaataccaattcagcgaccttgtttccttacagccctcgctattcttctcacagaaaggtgcgaaatattcaagtggatatagcggtagcgtcgtagatgcggatgcagatgtgaagatcaaccagctttatttggaattgcccatcaatgtacaattccgtttcaatattgcagacaatactaacctggtcattgcgacagggccgtatcttgcctgtggggtaggtggtaaagccaagttcgatggcaaggcatctgttggaggtatcaatatcaatggagatgagaaagtcgatacattcagtgatgacggcttgaattacaataggttcgatgccggttggaacatcggtcttggggtagagtttggccgaattcttgtgggggttgacacacagcttggcttctgcaagattatggatggggatgctccgcacaatgcgaatatcggtattactctggggtataaattttaaatagttcccttacgatcccttgattgagtatatttttattaatagtttaacttttttattgtagacaatctataaattattttatctgttttaaaataaaacggtgtagtatgaaaaaattattcattttattaggaactctttttttgttgtcagtaggtgcttatgcgcagaaagggaaacaagccataggtttcggtcttggttatggtacagaaattgaaagtatcggattgggaatcaagtatcagtataatataaccaatcctatacgtatcgagccctctcttaattatttttttgaaaatgacaatgtaagcatgctggatgtgaacgtgaattttcattatctgtgtccggtagctagcaatgtcaagctttatccactgtttgggttgactttgtccaactggatgtttgatatgtatgatgttgactgggatggggatcatgttcatgtggatggcgatgggaatcataatgaatgtcgtttcggtgtaaacttgggagttggagccgaatttgcattgagccgtaattgggccatgaatcttgaatttaagtaccagttggtcagtgattttgatcagggtgtcatcaacatcggggctgcgtacagattttgaagaaaatatcggaacagaaatctcattgatataaaagaggggataggcatagtttaatgcttatcccctcttttttagtgtttcaatgcttggatttcaaagccaaatcaatcgtcatcatcatcatcatcgtcatcatcatcgtaatatcgatagtgcttcttgtggtgtctcttcggttttttatatttgtgtttcttatggtgaaatttatcatggcgctcacagtatgaattatagtattcatgccagcagtcactatggtgatggactctgtcatagaaaggggtataatatacacttcccggatttatgccaatctccacaagaatacggttccatccgtaacgttgataccggttgtaataatcgcatacatcatgcatcttttttccggaagttctggctacctcaagtgcaatccccacatttccccagtcttttccacagcgtttgtagtaatcgtccaaggaacggcttgaaatgttgtattccagacatagccgtttcttataatcagaaagctccacggctgcgtagcggttggctctgccaataaagatggaaataccatcctgggcagacaaggtgcaggctaataggaggaaaagcagtagtaaattaatttttttcataatgtttctaagttaaatgggttcttgtcttttgctttttcaatttcatctccagcttcattcagagccttctttacatcatctgtcctttcttcaatctgtttctgtgtcttttcaaggttttcttcgacggattcctttacattttccagatgctctttaactttgtctttagcctttttctctctgcatgatgcaaagacaagtgtagctgtacatgccaacatgacaaataataactttttcatatccttatatttagtgatactatataattggttaaaatccaaatgtagaaataaagtaagcattcgaagaaatgcaccttttacactttgaggtttggttgtagctttgcggcagtgaatacaatcaaacctcaattattatgaacagacaagaatttgaagaattagaattgcaggtgcaacaaagcgagctgccgttgaagtcgtaccttcaacagataggtgtaagttattcaacctatcactactggcgtagaaaatgttccgttgacaggagcagtatcaaacacgagttggctcctatcagttttaaacaggcatttacggagtcttcccaagaagaacaattgccgcatggtgttgcgctgctgtttcccaatggacttcgtgcccacttcgggagcggttctgaagatttgctgaaggaaatatttacccaaagtcttcgagacggtcatgtttaacctgaacgacacgatgcgctacttcctgtgtcctggcaggacagatatgcgcaagggtatcagttcgctatgcggagtggtacatgagaaaatgaacagtgaagtgaggaacggtgatgtcttcatcttcatcggttccagccgcagactaatgaaactccttcatgccgaagacggaggtatggtaatgtatgtaaaacgtttggaggccggtcgcttcaagctgccggagtatgatcccaaatcaaacagctatcccatggagtggcgcgatctggtgatgatggttgaaggaatacaggaaaacccggaacagaggctccggcggttaagagccgaacgtaaggaataccatgtataacatgttttttgcgtgagtaaactttggatattgttgcataattcactgttaattagtatatttacatcattaaaagaagtatagacaatggaagaaaaagaaattttactcaagacgatagaagggctgaatgcctctatagcctcattgtctactactaataagaatcaatccgaacagataaaaaatctgcaggaacgtatcaaggagttgacggctcaggtcgcatggctgaaccgtcagctctttggtcgtaaatcagagaaacttcgcgtatatgatcctaatatgccagacctctttgccgacgagttttccggactccggcagcaggcggaagaaaagcgggacgaggctgtggaaaagattgagaaggaatcggtggaagacgtaaaacgaaatcgtcagaaccgcaaaatgatagaggacttgcccgtattggaaaccgatacaatagaaccgaaaggcgtagacttgtctttataccgtagaataggcgaagagataacaaaagtcgtcaaacacaagccgggaatgctttacgtcaaggtgatcatccgtcccaaatatgctctcaaggatagtaccctgcttcctccagccggacagaaaggcgtagagatagctcccatgccgctgatgccggtcgacaagtgcattgctgacaccagcctgcttaccgagatactgcttcagaagtatgaatatcatgtcccgttctaccgtcagatacagcaataccgccatcttggaatgaaaggccttaccgaaagtacactggacggctggttcaagaaaaccgtggaactgcttaagcctctgtatgaagaactcaaatgggaagtcttctcctgtgactatgtacaggcggatgaaactacagttccggtcattaacagagaaaaacacagagccgacaaggaatatctctggatggtaagatcagtcatggagaaactggtcatcttccattacgacgggggatcacgggccggagcggtcatcgaatccctggcaaatcaatataacttcaagggatatcttcaatgtgacggttttgcaggttatgaaacagccttcaagaccaaccccgacgtgcggctactcaactgcctggtgcatatacgccgtcattttgagcaggctttggatgaaaacagggagatggcgcaacatgcactgactcagatacagcatgtctataaaatagaacgccagtgtgacgaagccggcctgtcatatgatgagcgcagacagacgcgtcaggaactgtccaggccaatcatggaggcaatgaaggtatggatggagacagaaggaattaaatacagtccaagttctttgacaggcaaggccataacatatgcctataccaaatgggataatattatgagatgtctggacgatggccgcctgtactgggacaacaatctggcggaaaatgtccaacggcccatcactctgagcagaaaaaattttcttttctgtggtaatcacgaagctgcggttaatatgtctgtcatatgttctctgctggccacatgtaaggcgcacggggtaaatcccagggtatacctgaacgatgttatcgcacaaatgccttatcacaaaaaggcaacccaagaagaacttttgaatctacttccacataaatggaagttgaaacatccggaatgtgtactgacaaggcaaaaggaggaatcttgtaactgatataaatgtaagcattcgaagaaatgcaccttttacactttgaggtttggttgtagctttgcggcagtgaatacaatcaaacctcaattattatgaacagacaagaatttgaagaattagaattgcaggtgcaacaaagcgagctgccgttgaagtcgtaccttcaacagataggtgtaagttattcaacctatcactactggcgtagaaaatgttccgttgacaggagcagtatcaaacacgagttggctcctatcagttttaaacaggcatttacggagtcttcccaagaagaacaattgccgcatggtgttgcgctgctgtttcccaatggacttcgtgcccacttcgggagcggttctgaagatttgctgaaggaaatatttacccaaagtcttcgagacggtcatgtttaacctgaacgacacgatgcgctacttcctgtgtcctggcaggacagatatgcgcaagggtatcagttcgctatgcggagtggtacatgagaaaatgaacagtgaagtgaggaacggtgatgtcttcatcttcatcggttccagccgcagactaatgaaactccttcatgccgaagacggaggtatggtaatgtatgtaaaacgtctggaggccggtcgcttcaagctgccggagtatgatcccaaatcaaacagctatcccatggagtggcgcgatctggtgatgatggttgaaggaatacaggaaaacccggaacagaggctccggcggttaagagccgaacgtaaggaataccatgtataacatgttttttgcgtgagtaaactttggatattgttgcataattcactgttaattagtatatttacatcattaaaagaagtatagacaatggaagaaaaagaaattttactcaagacgatagaagggctgaatgcctctatagcctcattgtctactactaataagaatcaatccgaacagataaaaaatctgcaggaacgtatcaaggagttgacggctcaggtcgcatggctgaaccgtcagctctttggtcgtaaatcagagaaacttcgcgtatatgatcctaatatgccagacctctttgccgacgagttttccggactccggcagcaggcggaagaaaagcgggacgaggctgtggaaaagattgagaaggaatcggtggaagacgtaaaacgaaatcgtcagaaccgcaaaatgatagaggacttgcccgtattggaaaccgatacaatagaaccgaaaggcgtagacttgtctttataccgtagaataggcgaagagataacaaaagtcgtcaaacacaagccgggaatgctttacgtcaaggtgatcatccgtcccaaatatgctctcaaggatagtaccctgcttcctccagccggacagaaaggcgtagagatagctcccatgccgctgatgccggtcgacaagtgcattgctgacaccagcctgcttaccgagatactgcttcagaagtatgaatatcatgtcccgttctaccgtcagatacagcaataccgccatcttggaatgaaaggccttaccgaaagtacactggacggctggttcaagaaaaccgtggaactgcttaagcctctgtatgaagaactcaaatgggaagtcttctcctgtgactatgtacaggcggatgaaactacagttccggtcattaacagagaaaaacacagagccgacaaggaatatctctggatggtaagatcagtcatggagaaactggtcatcttccattacgacgggggatcacgggccggagcggtcatcgaatccctggcaaatcaatataacttcaagggatatcttcaatgtgacggttttgcaggttatgaaacagccttcaagaccaaccccgacgtgcggctactcaactgcctggtgcatatacgccgtcattttgagcaggctttggatgaaaacagggagatggcgcaacatgcactgactcagatacagcatgtctataaaatagaacgccagtgtgacgaagccggcctgtcatatgatgagcgcagacagacgcgtcaggaactgtccaggccaatcatggaggcaatgaaggtatggatggagacagaaggaattaaatacagtccaagttctttgacaggcaaggccataacatatgcctataccaaatgggataatattatgagatgtctggacgatggccgcctgtactgggacaacaatctggcggaaaatgtccaacggcccatcactctgagcagaaaaaattttcttttctgtggtaatcacgaagctgcggttaatatgtctgtcatatgttctctgctggccacatgtaaggcgcacggggtaaatcccagggtatacctgaacgatgttatcgcacaaatgccttatcacaaaaaggcaacccaagaagaacttttgaatctacttccacataaatggaagttgaaacatccggaatgtgtactgacaaggcaaaaggaggaatcttgtaactgatataaattgtaacatatgggttcaacaaaacaatagcggctgatactattaggttcatagtgacagtcgctattgttgtatataaaggtttaatacctgtagttggccgaatacttacggttcaacaaaacaatagcggctgatactattaggttcatagtgacagtcgctattgttgtatataaaggtttaatacctgtagttggccgaatacttacgaaataaatattgtttttagcaaattagggaaaagcttttgaacataatgttggggtaaaatatcttgtttgttaatgcatcctatactggaagtcttttcaaatcatcggatgaattagagataaacctgactttgaaatgttgtttgtgaatatatacaaaaaaggctatctatcccagacagccaatcttagtttaaccttatatctaatactatgaaaaacacattgcaaatgtacggatttgcaaggactgtgcaaattttcaaccttttcattgccatcttataacaaggtttagctggtaaatatattcgttaacgatttaatagtgcaaatgttaaatttaagctccagatacgttaaggtattgctttctcaattgcggcactgtagagcgattctgcaatattgtggaatattccgcacaattccacactggagtaaaaaattaaattgttttatgttgttgaaaatgagaataacgtcgatgcgctgatattttggcatcaattttgtactatgatttatgtcctaaaatttatcagtaacttatagttgttatggttagacaataggtattagttgcattaaggtttaaagctattttgttcatattgattttcattcggaaactctctttgtttagtattgcatcccggtctgtgaagcatcgggatgtttttcattttggaggattacagttttcgactgaatgctgcaatcttgtatagttagtcaatactgctttcattattctttgggggaataatgaaagcaggcttagtctatgaggattggatacactttatttaaaggctttatatttctaatgaggcaagatataaaaaatcaatctgtgtttatctactctgagaagtatgcagtactgttcattaattccgaaaaaaaaatcataaactctttttatttgcttttagacattgtcggctgctgatttatcgatgctttatatgtagatttgcaagtgtctttttatcaagatatggaaaaacaaactagaaaaattttaaaaatatccggcattatatcaggagggctgattatagccgcctttatagtaattgcaattgctctgaattttgtgtttacttctgaaaagttaactccggtggtattgaaaactgccaatcagaatttgaatgcaaaattggatataaaagatgtagaacttactttcttttccacctttccacggctcggattgaaactgaaagacggaacattggtttcaaaggttatccgtgacaccatgtggcaaaggactgacacattattgtctttcaagaaagccgtattggtaattgatgtaatggattatttgcaacagcaaaaggtaaatatccatcagcttgccttagacagtgccaatatctatgcatacaaggacgggactggagctgcaaattgggacattttgttccccgacacgacaaatatagcttcatcatcaacagatacggccaggcatgtgaatgaacttaatgtcgaacaggttgccataaaacatgctacggtaaccatggatgaccgagacacacatatctttgccaatctatgggacatgaatctggacttgaaggcaaacatgaaaaaggaacattctgtattggctttggatttcaagaacaagaatgtccttttctggcaaaatgggcaactgataactaatcgtgtcggcattcatctgaggactgacattgaactggatgccgttcatcgcactctccttctgcgtgacgctctaatcaatataaacggtactaaattaggggtaaagggaacattgcgtcatgatgcaatagcccaaacccttgatttagacctgcaatatgggttgcacgctccttcgttggaaaccgtattgcacatgattccagaaagtattctgcaaaagaaagaggtatctgtcaaaggagaggttgctttcaaaggagagctgaaaggaacctatggaaaacaaaaattaccattggccacattggacatcaaaattaaggatgcctctgcccggtatgccggattgccttatggcatagacaaattagaagccgatttttttgctcaaatagatctgatgcacgatagcccctcctatctgaatctgaaggcattccattttaaaggggcaaataccagcatacaggctgatatgaaagtagagaatctgttggctgatcccgatatcactttccatgctgaatcaaccatagacctgaatgcgctgaagcatgcttttccattacaagaaagcatcagtatggaaggggaaatggaaaccgatttgggagtacgctgccgtatgtcctctataaagaagcgggattggggacgtatcacggctgaaggaaaactcaagactgataaattcatgctacgtgatactcagaggaattttgagttcataagtaacgcatctttggcctttgccggcaatgaatggttaggggggcatgcccaaatcaaggatatgattctccgttctcctcaattagactctgatatgaaaagtcttgtggctaccgtcaggaccattccttccaaagacacaacccgaatggctcaggtagaatgtaaaatggaaatgcacaagctaaaagttgctttaggggattctcttggtttgttttgcggaaaatcctctgctacattgaaagtacagccgggggaacataatccaagcaagccccaaatagaacttgttatggagacagacaccttgttttgtcgcatgggaggagtcaaagctggaatgaacaaagcaggtataggaatcaccgcagaaaaaatacgtgattcattgtggatgcccgatggcatcgtggggtttaatcatatggctgtctgtattccggaatgtgcacttcccatacatatgcaaaaaaccgctgtaacagtgggaaaccgtactgtcaccttacgtaacgctaccatgcgtataggtagatctgacattacggcaagtggggtaatccatgatttgtatggagctgcgaaacatcacaaagttttacgtgccaagctgaatgtttcgtcggagcatttagactgcaaccagctgatacattcaatatcctttccctcggatacaattatggcagaaacagatacaatttctacgaatctcaaattgtttgtcataccaccgaagttagactttgaattgcaaacccatttccgacaagtattttatgaaaaagtgatcttcaatgatgtccacggggccgtagatattcgtaaccaatctgtgtacctgaaggagcttagcatgaagggtatgggttcggaaatgaacactacgcttgtttatcaggcaaaacgtccggaacaaggatttgcgggttttgatttccgcttgcataacattaacataggaaagttggtcgaccttgcaccctctttggatacaatcgtgcccatgttacgttcattcgaaggaactgtggatttcaatatggcggcagctgcggcattagattccaaccttaacatcaagataccgaccttgcgctcggccattcatgtaaaaggggacagtcttgtactgatggacggtgagactttcgctgaaatctcaaagaaattctttttcaagaacaaaaagaagaatttaatcgatagtatttcagcaaatattagtatcagagacggtaaagtgacaatctatccttttgaagtttcgatggaccgttacaaagcggcggtagggggtacgcaaggattggatatgaactttgactatcatatttccatcttgaaatcaccggtaccgttcaaattaggtttgaacatatcggggactttggacgacatgaaattcaagttgggcaaagccagatacaaggacgctgttacaccggcagaaatacataaggtggatagtgctatagtaaacatgggacgacaaattgaaattgatttcaagaaaataatgaaaagataacatagacaaattatcaagtggatatggcggtaatatcattgatgtggatggcgaggagttcaaggcgggagtgcaacatgttcattcagaagtgggtttcagagaagaaatggcgatttgtgaaacagcttgaacggcttcgtaaggcgcaggatgaataattgatgttgaaaaaactaatctggatttaaaaatggagttggagctgaaacagtgagagaagaagaagcgtagtgacaaagaatcgcaagatgggtaatgatacgtggaaagggattgaaaaaaacaccttcctcttgcgctcaaaaggaaggtggccttaaacgaaacatacaaagcttaaaaaaatgcgtttttttgaaactgctacagataaaggtgctttgatatgaaattttaggctaaagtagctctcttttttctttttctcaaatataggcatagaaaaattgttttaatgtccgttttatgtatcttattgtctcttttttgtaattttgttcagtcttatggagggaataaggcataagaaagttccttttccttagtccagactttcccaagtacggactttattgttatccaaggtttatgtaacttttaatgtcatctctcatttcaggaaattaaagctattctactgtggtattattccccttatgtggtattctgttctacacatttctacacatgataattccttgcttctttattaaaaccctatttaataggttattatattctcatttctgttttggcatttgttttgttctataattactgtaatgaaaggcataaaattaatatccatttaaaaattacgattatgaaaaaagtattagtagcattagcagtggttgtgggattaggtagttcagtagcattcgctcacgttacatcagaagtacagtctgtaattcaggctttgcaagatccccaagatgaatttacaaaaatcgaagtgaaagatcttccccaggctgtagtaaacacattggcaaaggactatgagagggctacaataaaagaagtgtttgttgcagagaaagaaatcggcaaggtttataaagtcgtattggttcttactaaagatgaccagtccgctgaagaggtaacggttcttctgaacgaaaaaggtgaatctgttgaatgacaattttctttttccctattggggaaaattacataattgatggaaatgaatgtcaataagtaattgatatgaaaaatcggtaccattcataagattgtgtaaatgataactcggatataagatatccgagttgttttttacctttataattgaaaaaacgatggatactgggttaaagaacacaaagctgtttctgcagaactattgagtaaagagttttaagccagtttaagactgagtaggaaggcaggctattgtcataaatatttgcaagtcagatatgttagagaagatgtttgagggaaagttggatgcttatcttggttactttcagccattattgtgtgctttaattgattgtatatattgaaaggaacatgctggacctcagcttttgtgtggctgaggttttgtcggagataagagagcgttgttaaacgtgcgatagtagatatatgttttactgatgattagtggatatttgttgactgtttatggaaaaggcgactgaatagtcactctttgggtttataattgtaataatagtttgtttcttatttgtcagatatttctgttatagaggggtgtcttatataaataatgtttatatttgtattctaatctctattatgttatgaatgacaaacaacgacttctaattgattgtatttcccttcttcccgttataggcattctggttttgataactgttgccaatgaccagtttgttactatggttgctgcctatgtgctttgcggagaactcttatgtgtattggttagcaggatattaaatttgtattatattgatgtggcttttgtttggttgggtggagttatgctttggttgtggtattggttctggttggagtcaagccatgtagtgatggaaattgtggaaaagacagttggatgaattgcttcttttcattgaaaaatccccgtagctttctgcatgtatttgtttataatttctttggtttacagtgggatagagagtgcggttttactttcaccgcttttgtttcaaagaaacaaatctcatacaagacatgctgagaaatagaaagtcaatggcttgtttgaattctcttgtaacccgtccaagccgtcacggatagaacgggtaaaatactttttgtcaatgctgtccgttcatggggcagacaacataaaacctaaacacttaactggaataattggcggcattacccaccaaaagcatccgaccctcacaggctgagaatactttcattattccaaagaataaaatagtattatatcggctaactatacaaagttatagtatttagtcgaaaaccgcaatcctccaaggtaaaaacatcccgatacttcacagaccgggatgcaatactaaacaaagagagtttccgaatgaaaatcaatatgaacaaaataactttaaaccttaatgaaactaatacctattgtctaaccataacaactataagttactgataaattttaggacataaaccatagtacaaaattgatgccaaaatggcaatgtaacaatgttgcattcattttcagcaatataaagcaaactcttttttacttccttgtggaatatcgtggcgcattccacagtattgtagaataactccacagttttaagtaagagctactgactcccattcgctccaagtaaacgcacgaaagttcttatacctccgtttcctcccattgtactcataatttgagttatccaagcaggggaataaccggttgtcgctatgaagctatatccatttggaattgggcatttaacaagtttatgacaaatgcggtatttttttattgtatagtgtgcctcggcttatgtcgaggctttttgtttcataatgaaagccttctcttctttagattgaggagggaaggctttatacagctaaacaagaatcataagcctcacggcttcatgtgtacaaatataatgcctgcttttatctttttaaaggatgagtgttctgaatttatagtcaagtcctctgtttttttactatggaaatcacactgatatttttttatattccgaatctccttacctttgtgtaattatatctgcttatttcaatgaaaactgaattgatagagaatatagcttttacaaaggaagactatattcaaaagacaacgaatgagagcatgccttcctttgatgagctcttggataccatagtcgcatttgtggaggagaacggcggtagtctggaggatgccgttgatatggcgaacgatacgtattttcaattataaatgattagataaagcaattatggcagaagagagtaaatatgcatacgacgaggaatccgtcaaggtaataattgaatgggcacaaacagcccaattacccaaaaaggtgatgctaagtgaggcggaacatatctttgacacctctctgtatgttaatgcgaatatctgcgatattaagcaacattatccggatgcattctataatccggccattgatagattgtgtcggttgaaggaaataatagaaggagcggctaaatagtcgctcttttcatatcttaagtataataaaagtcatcctctcttttcgctaaaagagaggatgatacaaacaaaacaaacattttttgtgtcttcacagacacaaaagaataaaaatgtaaaatgttcaggagaacatttatatatgcaaaagtatgacatgtttttttataaaacaggacaaaatatataaaagtctacaaataatatttaaggaaggtagagctgtgcatagattttattgcttttgaataaattgtacaatttatcagcctgatgtgctacattgagagatggccattatggataactgggagctgatattgggtaattgatataaaaatcccaggtacgctcgaatggtctaattccacttctgcaaatcgccctcatactttacaaatgtttttgatgcaggtctatatagcttttctgatttatttttgtttttgcaatttttcggcaattatttagccccaaaagtgaaactatttttaatttgcttgtttttcgtaagtacttgttgcacctaaaaaagcacttccaacgttcgcttacggaggaagtgcttcacacaaaaactaaactagacttaactaaactattctattgggggagtttcacaactcctatctgttcagcgcgaagataaaaaaacatattttaatctgcaaaaggattctataataaatcgacggcttttccgattttatcgacggattggtcgatttttttagcttctttggtctaaaaattcttgaaaagcttgtttgtagctgtcgcttatcgggatgtaattctttccgaatacgatgcgaccacggtctataatacgtattttatccttttggacaatgtaggaacggtgaacgcgcatgaaacgcgaggtgggcaggagttcctccatagccttcatgctcattaaagacaagatgggcttgggggaatcttcctcgtagattttaagatagtctttcagcccctctatgtacagaattttacttagttcgatttgtaccagcttatactcgctctttacgaaaatactctgaatttcttcctttggctgttgcagcagttcgaaccattgtacagccttgttggcagcctgcagaaagtcgatgtaggagatgggtttcagcaagtagtccagcgcattgactttgtaaccgtctatggcgtattggtcgaaggcggtggtgaagactatgcgggtattgaaatcgaccatctttgaaaattcgagtccgttcagttcgggcatctggatgtcgaggaaaagcaggtcgatgtgcttttcgggcaactccttgatggcttgcacggcactggagtatttaccggccaactccagaaacggggttttgttgacgtagctttccagaagccccaaagcaaggggctcgtcgtctacaatggcacacttcagattcatatctttatgattaaaacagatttatactctttcatgttttcgctcactccttgcttccagtcataatgaccgggataggtcagctccaggcgtttgcgcacttgctccagaccgatgccgcttccgcttttgtccgccatgcttttgggatggtaactgttggttatttcacagtatatctctccggggctttcactgaaatggatgcggataaagctgggctcggtgggagagatgccatgtttgaaagcattctctatgagggaaataaagatgagcggagctatttcggtacggctgtccggtcggacgtctatcttcgtttccacacggacgttggcggagaggcggatgcgcatcagttcgatgtagttgcggatgaagtccatctccttgtctagggtaacgaagttctgctgattgtcatacagcacatggcgtagcaaccggctcagttcctgcacggcagtctgtgccttgtcagtgtcaaaggcgatgagggcgtagatgttgttcagcgtattgagcagaaaatgcgggttgagctggttgcgcaggttcttcaactcggcttccgtgcggcttttctcggcttcgcggcgggcggcgtccatctgcgcccagcggcggctcagcttgatggcagcgctgaggccggcggtgagaatcatggtcgatacatcgcgcaagatgaatatccatttgggaggacccatgtgctgaccgtcatcatcgccgcgcagatggttctggaatgtgtattcttgccaaaggtgggcgccggtggtaatgcagatgatgagcagtgtgttcagcaggaggtactgccggatgcgtccttcgaacaagtagcggggaatgaggagacagtagttgatgtagaatacaaggaagaacgagagggtactgctgctaccgtggcgcagatagtccgcaaggctgatgttgaagccactgcgtgtcatcatcagaaaggggaaaccgatgacgataccccagacgatgatgtgtatcaggatttcgatgccgcggtggcgtgggttagggagctgttgtttcatcataatacaaagatacggattttagatggatattggaaatatccaccgcctgcgaagcaaatctctgttcgcaggttgcggataagcgtttccaggttgcggatatgtatcccaagcttgcggatgtctatcccaaagcttgggatagacattatccttaattcggcataacttttctctttattggcagaaagttttttcttaatacttagaaagtttttctttaatacttaggacgtgttttgataacttctggcaagagagagataggttattcgtagcgtatggcctctatcgggtcgaggtcggcagctttcttggcgggataccaaccgaagaacactccggtgacggtacatacggcgaaggagaggaatacgctccacggctggatgaagatgggccagtgggcaacgctcttcactatccagctggctccgcatcctatgatgacgccgatgatgcctccggtgatgctgataaggatggcttcgataaggaactggctcaagatgtcgacaccgcgtgcgcctacactcatgcgcagaccgatttcgcgtgtacgctccgtcaccgatacgtacatgatgttcataatgccgatgccgcccactacgagcgatatgccggcgatgcaggcaagcagcgtggtcatcaggtcggtagtggagttcagcatggtgctgagctcctgctggctgcggatagtgaagtcgtcatcgtcactctccttcagcttgtggttgcggcgcagtatctcggtgatttcgtcggtggcattgtccgtcatgtcctcggtgagggcggaggcgaagatgccgctaaggtaggtctgtgccagcaggcgtttcatcacggtgctgtaaggggcaagtacgacgtcatcctggtccatgcccatggagttgtagcctttagatttcagtacgcccaccacgcggaaaggaatttggttgaaacgtatgatacgtcctacggggtcttctccaccggggaaaaggttgtcttggatggtctttccgatgacacacaccttggcggaggtctgtatgtcggcttcggtaaacatctcgccgttctccacgctgagctgccggatttcgagatagtccgtgcccacgccgctcacggaggaggggtagttgttgttgcccgcgatgagctgcccgctggaggagacattggggctgacggcagccagaaagttggtttcgtttcgcagggcttcgtagtcggtcagcttcaaggtctgcatggcgctggggtcttggcggacaccgccgcgcatgtcggcaccggggtgaatcataatcatgttggagcccatctcggagatttgcgcctggatgcttttcttcgaaccttgtccgatggcaagcatcgtgatgacggacgccacgccgatgatgatgcccagcatggtgaggaatgcgcgcagcttgttgttgttcaaggctcgcaaggctattttgaaaaggtttgttccgttcatatcgttttaatggaaagtttaaaattaatccctaatccttaatcccttatccctcattcctcctcctgcttaggcaatgctgccagggcttcggctgcattctggatttgggtgttgatggtatcgtccttgatttgtccgtcgcgcagcacgatgttgcggctgctgtactgggctatttcggggttgtgggtgacgaagatgatggtgcgtccttcggcatgcagcttttggaacagtaccagaatctcgaaagaagtacgggtgtccaggttacccgtagcttcgtctgccaggataacggcgggattgttcaccaaggcacgggcgatggctacgcgttgcatctggccaccggacatttgattggatttatgttccagtcggtcgcccagccccacggcttgcagggcttcgatggcacgtctccgcctttcggaagccgagacggaggagttatacatcagcggtagctccacattttccacggcagtggttttgggcagcaggttgtaactctggaatacgaagccgattttacggttgcgtagtacggcgcgttgaggcttgctcatggtgcgtacggagataccgtccagcaggtattcgccgctggtgggcgtgtccaggcagccgagggtattcagcaaagtcgactttccggagcccgatgtacccatgatggtgacaaactcgccttcacggatggtgaacgagacgccgcgcagggcatgcacggtttcgtcccccacctggaagttgcgtttgatattttgaagttcaatgactgctttattcataattctttttttgtattattttccgctcttcttcttacttcccggagggccaggcatgaacggactcttctcaccgccgggagcttcctggctcatgtccggagtgccgctgccgggcatgctgccgatgttggcttcggtcaccactacggtaccttcgttaatgccgctgataatttccgtgttggctccgttggagatacctatcttcaccggatgggcggtaaaggtgttgccttcgcgggtccagagtttatgttccccttcgcaatccttcacgatatcattgtcgccgataagcggtttttcggggttgaagcgcagggcacgggcaggagcgcacagtacgtctttgcggtcgagggtgaagatggtgacgttggctgtcaggcgtggtttcagtttcaggtccgggttgtgggcggagatgactacttcgtaggtcacaaccgtgctggtgctggtgctcgacgtgctgcttgagctggcatctcccagacgaatttgtgtgaccactccttcgaacacgtcattcgggtaggcgtctacggtaaacgtggcgcgctgtccctcttccacaccgcctatgtctgcttcgtccacgtcggccacaacctgcatctgcgtcaggtcggcagcgatggtgaacagtgtcggtgtctcgaagccggaagccacggtctgtcctgcttccacgtcgcggctgatgactacaccgtcgatgggagaggtgatggtggcgtaggagaggttgcgttcagcctttgccagtgatgcctggctgctttcgtagttgctcttggccttctcgtagttatagacggactgctcatagtccgtggcggcgatgagctgcttttcgttcagcgtcttgttgcgctcgtagagttttttctggtactcgtattcggcctttgcaccgttgtaggcggcgcgttgcgaagcgagttcgctttgcagtgtcacgcgatccatctcggcaatgagttggcctttggttactacggaattgtagtctacatgaatcttgtcgatgataccgctcacctgggtacccacttccacttccgtcaccggttcgatggtccccgtggcggttacggattcggaaatctcgcctttatggatggttgctgtggcgtaggtcaccttgtgcttggccttggcaccaccgaagagccatacgccgccgcccactatgattacggcagctacggcaatgaggatgattctttttttgttcatatatatataaggtattataattcgattttttctccttgataaaacttcagtagctgcatattcagtatggccatgtatttggcttgcagtgtctcctgctgtgcgctgagcagattgcttttctcagtcagcagttctacggtattcttcatgcccaggttgaactgctcttgaatcagttcatagctggtctgcgtacttttcagtttctctgtggcggcggcgtagcgctgctgggcgctgttggcatcgagccagagggtttcgatggtcttgtacagcgttttttggtcgtccagcaggtccagttcgctggtctgcttctgaatcttggctttctctacggcactcttggtctgccggttgctgaagatgggcacgcttacggtgaagcccagcgagttgttccagttctgtttgacttgctcgctgaaggtgaagtcattgccgttggcatggctggttccgatgccggcgctgaggctcagcgtaggcagatagccagcgcgggcaattttgatgtcgaggtcggatgtctgtatattcagtttgccggcttctatttccggacggagcacgagggcagaacggtaaacgtccgttttggtgggcaggggtgccagtacgttttccgtgccgagtgtggggatgtagaggttcatctcggattcgccgtccagttccaggagttgtttcagttgtagtttgtagtcttgcagggtggcttgtgcggtcaccagttggtacttgtcggtgcttacctgcgcttccagttgtgccaggtcgcttttggctatgcttcctgcttcgagaagctggcgggcgcgttcgcattcggcttggctcacttccagggtcgattcgttcactttcacggcttcggcggcgtagagtatctgtacgtaggtttgtgcgatactttcttcgatgctgttctcgctctgtgctacgctaagttcggcaatgcggttgttcagttgctgttgtttgatggtgttgaggcgtttcccgccgttgtagagggtccagttggcatcgatgccgtagctgccgttgtaggaagtcttgctctggctactggtgatgttgtcgccgtcgatgatggtgtttgtctcgctcttcgggcgattcacgacacgctggctcacactggccgaaaggctggggaagagagcggctcgggcggtctttacatctacctgggcactttccgcactgaggcggttcttgcggatggtgatgttttgctgcaaggcatagtcgatgcacgcttgcaagtcccattgggcgggcaggctgtcggctggctgctcggaactgccgggtatctgcgtggaagtgccgttttgggcggccactcccatacagcttgccatacatagcgctatcactgtcaatctttttacgttcgtcatatcttcgttattctatggttttacatttgcaaatgtagtagggtggagaaaggattgcaaaagtgatagacgtagagtgaattttcctcgcctaaaatcttttttgtaccgatgaatgggagaagtcttttttctgttcaacttttcacctttttatttgttctttatataaaagtattttatatttgtaatcattataattttatcagcatgaaacgaactgcggtaaacatttggcgtttttatctggaaggttttcgaagtatgacgttagggcgtactttgtggcttatcatccttgtgaagttattcatcatgttttttattctccgtcttttcttcttcccacggtttctgaatactcccgtggtgggtgacgacaaagaaggctatgttagtaatgaacttatccaccggagcctgggtgactaaatacggagacacagagccacagagtttatgtccttgcctttataaattctccgtgtctctgtgttcttacttgacaacccaataacttagtaactcaataactcataacttataactcataacttgattcttatgcttggacacattgacacttctctgattgactggtcgagagcccaatttgccttgaccgccatctatcactggatttttgtgccgctgacacttggactggcggtaattatgggcatcatggaaacggcgtactaccgtacgggtgacgaattttggaaacgtactgctaaattctggatgaagattttcggtatcaactttgccattggtgtagcaaccggtatcattctggaatttgaattcggtacgaactggagtaattacagttggtttgtgggcgatatctttggtgcaccgcttgccatcgagggtattttggctttctttatggaagcaacgtttatcgccgtcatgttcttcggctgggataaggtgagtaagcgtttccacctggcatctacctggcttacggggctgggcgccacgatttccgcctggtggattctggttgccaatgcgtggatgcagaatcccgtaggcatggagttcaatcccgatacggcacgcaacgagatggtggacttctgggctgtggccacttcgccgatggctgtcaacaagttcttccacagtgtgctgtccggctgggtactggctgccgtgtttgtagtgggggtgagctgctggtatctgtggaagaagcgcgagaagaaatttgcgctggcaagtgtaaagattgccgcatgggtaggtctgtgtgccgccgtgctgtctgcctggacgggcgatggctccggctatcaagtggcgcaaaagcagccgatgaagttggctgctatggaaggttattatgaagggcggcaaggtgccggattggtagcgttcgggctgctgaatcctgccaagcagacgccgcaagacggagtagacccattccttttccgtgtggaaatccctaagatgttgtcgttgcttgccgaacggaagacggatgcctttgttcccggcatcaatgacctgctgaaaggcggatacccgttgaaggacggtactgtggcgctttcggcagaagagaaaatagaaaaagggaaaacggccatcagtgcgtttgccgcctatcgtgcagccaaggctgcgggcaatgaggcagatgcagaggtggctgccaaagtgttgaaagataatgtagcctatttcggttacggttatatcaaggatgtgaacgaattggtgccgaatgtgcctcttacgttctacatgttccgtgtgatggtgatgttgggtggatatttcatcctcttctttatcgtggtgctgttcctggcctataagaaagacttgtcgcggatgccgtggatgcattgggtggccatgctcaccattccgctgggctatctggccggacaagccggatgggtggttgccgaatgtggtcgccagccgtgggccatccaagacatgctgcccacaagtgccgccatttccaagttggatgtcggttccgtgcagaccacgttctttatctttctggtacttttcactgtcatgctgattgccgaggtgggaattatgctgaaggccattcgcaaaggcccggaaacagaaacgcataattcataacataactcataacttataattcataattcacaatgaatacctatatttttcttcaacactattggtggttcgtagtctccttgctgggagcactgctggtattcctgctgtttgtgcagggaggtaattcgcttctgttctgtctggggaagacggaggagcaaaagaagatgatgattaattctacgggacggaaatgggagtttacgtttacaacgctcgtcacgtttggaggcgcgttctttgcttcgtttccgttgttctatagtacgagtttcggaggagcctattggttgtggatgattattctgttcagctttgtgttgcaggctgtcagctacgagttccagtcgaaggcgggaaatctgctgggcaagacaacgtatcgcacgttcctggtgataaacggagtggtaggtccggtattgctgggtggggcagtggccacgttcttcacggggtccgaattttacatcaataaagggaatatggcagatacggtgatgccggtcatcagtcagtgggccaatgcaggacacgggctggatgcgctgctcaatccgtggaatgtggtgctcgggctggctgtgttcttcctggcgcgcatcttgggggcgctctattttattaataacatcaatgaggacgacttggtgagacgctgccgccgggcactctggggaaatacggcattgtttctggtgttcttcctggccttcgtcatccgtacactggtggccgacggctacgctgtccgtccggaaacgggagaggtgttcatggaaccttacaagtatctgacgaacttcttgcagatgccggtagtgctgtttgtattcctgattggtgtggtggctgtgctttggggcatcatccgtacgctgtggaagccgacgttcgacaagggaatctggtttgccggtgcagggacggtgcttgcggtattggcattgctgcttgtggcaggctataacaatacagcctattatccttccacccacgacttacaaagctcgctgacgttggcaaacagttgttcgagccagttcacactgaaggttatggcttatgtctctatccttgttcctttcgttcttgcctatatcttctatgcatggcgcagcattgataatcgtaagattgatgcgaaggagatgggagagggaggccatgcgtattaattaaaaattaaaggggatgtatcaaccccctttgaacgcttttttttaggcgcggattacgcagaataacacggattcagtttattgaatccgtgttattctgcgtaatccgcgcctaatttataacattatgaaagtgctcatgtactttgggcacgtcctctttttattcttttgtctgtttctcatttagctggaatttgggtatcagtttcatcaatcgtagaatctgtccttgccttttctttatgtaaggggaggggtgtgctgagtcgaagcgtatggggttgggtagtgtggctgctatcagtgcacattgtccggcagagagtttggctgctgtagtcttgaacttgtatttggcggcggcttgtgcgccatagatgcctttccccatttcgatggagttgagatagacctccatgatacgttctttggaccagaagaattctatcagtacggtgaagtaggcttccagtcctttgcgtacccaggaagattggggccataggaatacattctttgccgtctgctggctgatagtactggcgccccgtttccgttttcttgtttcattctcctttatcgctttctgtatctcaatgaaatcgaacccgttgtgtgtggcaaaccggttgtcttccgaagcaatgacggccatcggcaggtgaggggatatcttgtcggaagatacccaagtatggtgccaacggggactttcgcccttgaagacttgctgcacgctgcggataaccatcaatggcgtgatgtagacgggtacaaaacgataaaccactaccgccaggatagtggaaataaagaagaataatatgatgttgcggaggaaccgcaaaggtttcgggagtttcatggagagagtgccagtgtgattaatgtactaatatgtcaatgtgattaatgtgtcaatatgccaattagcacattggcacattgatcacattagcacattaattattcgcctccgcattcttaatcatctgttcgctggcatacatatatacctctacgcgtcggttctggtcggcagacagactttcatcgtattcgttgtatcccacgccttccactttcttgaactgggcaggagatacaccgcaatcctgcaaatagttttctacagcataggcgcggttcttggaaaccttcatgttggcttcgtaggtacccaccttgtcggtatggccgatgatggcaatgtccgttgtcgggtcttccttcagaatctgtgcaagttcgcgcagggaggcctttgcctcgttgctcagtgctgcggagttgaagccgaacagaatacctgccgcaaaggatactttgacagccggcaagccgttggcatccgttacctgctccacttgggcaccttcaatcttggcagcttcggcagccttcttgtccattttgtgtccgatggcaacaccggcacctgtacctactgccgcgcctactgccgcgccaatggctgcccccttgcctttacctatcagtccgccgataatggcacctgccgctgcgccggaaccaccaccgattattccaccttttgccttgttgttcatggtgccgcaactgcccagcagcaatgcactgcataaaaacaatactgtaaatttcattttcttcataactcttttttctttaaaagttgatcttatctttaatgttgcaaatttatgtatatataaccatatttctcttcctaaagttcgtcagttctgttcttttttagagaattttccttttgatggatatgaaccaggctgtcagtatcagacctttggcaatggtggttccactcactgcccaccagatggcgtccactcccatacccatatgtaccagtagcaatgctaccggaatgcgcatatagttgcatccgatactgacaatagcaggcggtaccgttcgtcccagtccgtagaacacaccttgcatggtgatttccatcatcatgaacatttgtgaataaccgtcgatgcggagaaagtcacctcccacacggtaggcttcggcttcgggcacgaagatagagaacacttcactgccaaagaagataaagagcagtgagcagagacttccgaatacgcccgtcatccatagggtggtgtgccatgcctgcttcacgcgcgacttttgtccggcagcatagttctgtgcaatgaatgtactcagtcctgtagagaatccttgtgaagtgttccaggtgatggcctcgatttgtcctccggtagtgaatgccatcagtccgatgtgccctccctgctccgaagcggtgcgcgagaggaacatgttgacgaaagcaaagagtgtgttcagtgtggccacgggcaggccgagcttgaagatacgccgggtgtacttcttcttcagacggacgaggaaggagaatccgccgagtacagcgcttttcccccggagtttgtagacgaagatgccgaagaccatggcttcggacagccaggtggcaagtgcagcccctaccgtcccccagccaaagccgaagatgaaaagagggtcgaggaggatattcataaccagtcccgttccgctgatgtagaacggaatcttgctacgtcctgccgcgttgtagatgcccgtgaaggcagcggagagaaagacgaacggcagtcccgtcgacacgatgcgcagataggtcacggcggcgtctgtgatatgctgtttcagttcgaagatgttcaggatggggcgggcgaaaagaaacagcagtcctccccagcagacggagatgagcagggcaattgtaatgttgtgtgaagcaaaactgcgtgcatcctcttcgctgcgtgcaccgatggactggcctacgctgacttcggcacctaccttgttcaacaaggcgatggaaccggacatccacgtcagtatgcctaccgcacctactgcagccacggactcactgcccagacgtcctacccatgccatgtctgtcaggctgtaggccatttggatgaatgaggtggccatgatgggcattgccagcgtgaatagctggcggttgatggggccttgtgtcaaattcttagttccttgcacgttgacgtttttttagataaacaatgtattaatcatctcctttttcgctttctgcggaggcggtggcggcgtttctgcttgtactttcgtatcttggtatataccagccagatgaagagcagaccgaagacggcgaagatgagcagtacgatgcccgtattgagattgtcacctttcacgcggctccacatttcgagcaccagttccgtgcggtcgccgaagtcgcgtatcatggcgcagcgctccactacgcggcggtcggggtactggaccgggtctatctgtaggctgtcggctccggacaagggaccgaagaagtagctgaggtcggaatgcacgtcaagcgtggtgtcggtcttcgcctccatgatttccggtgtggcgacggcgctgacgtaaccgatggcatccatgttgcgcagcgccacggagggctggcagaggtagttgatgaaatagcttgctgccttcacgttgcgggcgtagcgggggattacccagccgtcataccagatgttgctgccttcgcgggggacggtgtagtccagttccacacccacggcatcggcctcctcgatggcccagacggcgtcgccgctccaggtgaagttgatccacgccttgttcttggtcatcatttccttgccgaagtcggcttcccagccggcgatgttgggtttcatctccttgaggtatttctcggcaagggcgatggcctgcggggagttgtcgttcatcagttgctctacggtgacggtgctgtcggcaagttcccgggcatgggcgtaaatgatggcagtgccgtaggcgtcgcggtagctgtccttcatcagtatcttgctacggtttttgggagtccagaggatattccacgtgcccgcctcttcgggagtaatgaacttcttgttgaagaggatgccggcggtgccccacatatagggcacggcatagtcctcggtctggcgttcaggttgcgaggtcttgttcagctcgtggcggatgtagggcgacacgttggggatgtagtccggtgtgcggccgaagttgcggtcgatgggtagcaggaggtctttgcgaagcatacgttcgatgatgtactccgaggggcatacgacgtcgaagtcctcgtgcccgcgctcaattttggtgagcatgatttcgttgatatcgaacacctggtagatgatacggaggtcttcgcccgtctgctgcttgtaccagtcgggaaattcggcaagcacatcttcatcgatgtagtctgcccagttgtatatcttcagtacacggctgcgctcttctgtagagtttccacaagaggagagggatgcgatacagcacagtagaatcagtatgtttattatccttttcatcatcttgtttttgacaattgataacttataactcatcactcacatcaatcgttttttgtccgttcggcccgcttgttgattacaatcagcaacaccagcaccgtcacgaagatgatggtggagagtggccgcagttccggcgtcagtccacccttgcgcgcatcggcgtagatgtaggtggagagcgtttccagcccctggttgccgatggtgaagatggtcacggcaaagtcgtcgatggagagcgtgaaggcaaggatgaagccgcttatcatacccggaaatatctccggaagaataaccttgcgcagtgcttggaacggtgtggcgcccaggtcgagtgccgcctcgtagacattctggttcatcttcttgagccggggcattacgctgagcaccacgtagggtgtgcagaaggtgatgtgtgccagtaccactgtggtaaatccttgcgatatgccgaagctgacgaacagcaggaacagcgacacaccggtgataatgtctgcattcatcatcgggatggcattggcgaagttcattacctgccgtgtgcgcgagcgcaggttgaagatgccgatggctgcaatgctgcccagtgccgtgctggcggtggcggcaagcagggcaatggcgaatgtgttccagatagcgttcatcaacgagtggtgcatcccgcccgtgaacagcgagctgtacagcttggtggagaaccccgtccagttgcccagcacctttgcttcggtgaaggagaatatcatgattatcaggataggcgaatagagcaacgccaacagcagccacaagtagccgcgggtcaagattcgtgtcatcatatcacacctccgctttcattcgatgcgccgtcttcctcgttggtgaagaggacggtgatgcctatcagcagcagcatgatgagcgagagggcggcaccgtagttccacattccattgtagatattctcttgtaccgtggtaccgaaaagcttgatgttgttcatcgtcagcagctcggcgatggcgaaggtggacaccgtaggcataaacaccattactataccactcatcacacccggcatggacagcggtagaatcaccttgccgaatacgtgcgtgggggaggctcccaagtcttgcgcagcctcaatcaaattgtggtccatcttctgaagggtgttgtaaatggggtatatcatgaacggcaggaagttgtagaccataccgaacacaagtgcgccttcacccagcggcaggttcaggaagtcgaacagtgctactgtggcaagcgtacgtatcaagatgttcacccacatgggcaggatgaacagcaccaccatggtgcgcgaggtgttgaattgcttctgactcaggatatacgccgccggatagcctagcagcaggcagaccagcgtagtgataacggctattccgatggagtagacaaacgtgttcatcgcttcggggtgcatcatgaacttgcggaagttggcaagcgtgaacgctcctccgtcgtccgtaaaggcgtagagcacgatgagcagcagcggtactataacaaatacaagcagaaatagcgcgtagggtaccgtccagttgcgccgacgcataaagaaagttatcatctttattaaggattaagggattagggattaaggattagggattagggattaagggtggaggataaagaatttataatagctaacccttaatccctaatccctattctttattccttattctcacgttttcgggtgcgatgatgatacctacacggtcgccgtcgtcccacacgtcgttggtgtcgacaaagatgtcttcgtcccagtctgtaaacacggtcaggtggtaatggtttcctttgtagaggatgaatttcacttcacccgtcagacggccgtcctcttcgttgtcttcgaggatgacgtcctggaagtccacttccacttgcacgctgctgcccggttcgatgccttgcacgggcaggcattcgaagttacagcccaggaattctacgtgcgttttgtccaccagttttccttcgaaggtgttgcaggtgcgttctttcttcatcacatggatgtcgaagggttttaccagcagaccgacttcgcgtcctgcctcgaaggcatggtagtcctgcaccatcagctcgtagccttcgcgcgtttgcaccagcatttcatagtgtacgcctttgaagatacagctggttacggtgcccgtcagctgtgcggcgtcggatacatcgaagatgtagatgtcttcggggcgaattactacgtccacctgcatctgttcaccaaatcctgtgtccacgcattcaaattcgtgcccgcagaaggtaacggccttatcttttatcatgactccgttcaaaatgttgctttcgccgatgaagtcggctacaaaggagttgatgggctcgttgtagatgtccgtaggcacacctatctgctggatgcgtccttcgctcatcacaacgatggtgtcgctcagggtgagtgcctcttcctggtcgtgggtcacgtatacgaaggtgatacccagcttctggtgcatttccttcagttccatctgcatgtctttgcgcattttgaggtccaaggcagcgagaggctcgtccagcagcagcacttcgggttcgttgacgatagctcgggcgatggctacgcgctgttgctgtccgccggagagggagtccacgtcgcggtcctcatagtctgtcatgcccaccatgcgcagggcttgtttcactttcttctcgatagtggcaccgggcagcttcttcagcttcagcccgaaggctatgttgttgaatacgttgaggtgggggaagagggcgtacttctggaacacggtgttcaccggacgcttgtgcggcggtgtctgtgtgatgtcctttccggcaatggttatcactccttccgaggctgtctgaaagcctgcaatgaggcgtaacagtgttgtctttccgcagccggacggtcctagtattgttacaaactcgcccttacggacagacaaattcacatcattcagcacggccttgtctccgaagaatttcgatacatgttccacaccgatgatgcaatcggacttttgcataagcgtcttttactttatccaaacgaattaaacgaatttcgggctttcaaaaaagcgagtgcaaagttacataatttatcgggaattttcgctttactctaaaattcattatccctatgaagttaaaataaacacatagcgaaaaagtaatttttggtaaagtgtagataatcagctgatatatcgtttgttacttccgagccgcaatactccgtatcgctgaaaattctccaatagggcaaggggcaagcccctctgcacaccccgtcgaggacggtatttcgccgccctcaaagatagttagatttattgtttcacaagccaaaaaagaaaggaaggatatatgggtttcgtagttttacacatggaaaaggcgcacggcagcgacagcggaacgaccgcacatatcgagcgtttcatcattccgaagaacgccgaccccacatgtacccacctaaaccgcagtctcatcgaataccccgacggggtgaaagaccccacggacgggacgagactggttcttgccattgaccgaaagcccattgtcgagtggttcaaagagcaattcgacaagctacggcagagcatacaccgacctatacagccgcaaaggaaaggcaggggaatgaagatataaccgttttatcttgctggaaaacaataaaaagtgctgttcataatgccttatgaatggcactttttatatatttgcacacaaaataaggatagagcaaataaaagtaaatacagaatcgtaaaatttgacagatatgaaaacacaaaaattagaaatactgatattattcctctgtatattcggctttataggctgtgataacaaagatgaagagggtgagaaagtgacagactacaaggaatattctctaaccattgcatcaaagaagatacccggtgtttgttggtcagacggatttaattatttatctgatgtatatgctgtaaagaaagaaaatgcccaagaatgggagagccttggagtcattgataaatttgagtttgagaaaggatatgaatataaggtaaaaatcagtgaaacaaattatttggattatagcatggaaaatcccgcatggacggaatatgaactacttgaaataatatctaaaaataggaaagattcagaaaatttgcctttacattttatccctaaatcatactacgagaatgtacagcttcctaaatacaaatatgtagtagatgcagataataatcaaaaacttattgaagaagaattggaaaaagaatctcttattcctttggattttcactatatattttggcggagcgaagacaaattcctaagatgtattgcaataaaagacgataataatacactgggaccgtgtattataaaaaacgaaaacaaagctccggaagaaatgccagaatcttacaaattacttcctccagagggaaatgtgtttggttatggaaaatggactttttcagatgaacagggaaatgaaacgaattatctttcatttgatgtgtttatgggtcgttctgctaaatcaagaaacgtagatttaactcccgatgtagcttatctttataaagacctttctgaatactacaaaaataaatatccgcaagccggagtaaaaacagttgtggtttcttatgccgtttctattaaataacataaaatcctcagcgagcatcaattatcctaattatcattgcaactattataagaatctattaatatgagaactatagaattaagcataaaaaaacgtatgaaaagaatgaatttgaccgctttattgttaagcagtgtctgtttgttatgccaaccccttcaagcccaacagagcattgatgcttgtgacggtcgtacttataaagtaggcgacacgctccgtattggcgaaccattgccttcgggctatctatttattaggcagctaaacgctaataatcaattcgacagtctggatccgaaaaactcaaccggacggactgccgtcattaccgacatacctacttaccagcccgaactctatcaacagttcggcatttaccaacagccggaaacgccccaaatagtctttgccgaacaaggggatttcaagatcggcgtatatctaaacatggctttaagcaaaggaaacatcatgtccggacatcatgtttcccttatgaatggagctgttgaccttaccccagctatcttgttcgcctacgtacataagctttacggcaaacctatcgacacaacatcagttgaaacctatgcctctctccgtgctcccaaacaatatgcagaagcagccaatgacccgtttgtactggaagaactccgtacaacataccggaaagaactggaacaagctgtagcaaaggcagatttcaataaagtgttccgcatcaaatgtttctcggaactccaaatgtatgacattaatcaacagcattttccgatttcgggcttaacgtgtgtcgatgtggaaaccaagcagaacagagaattatcccaacaaggttattgcttatggggaacttgtgcctttcatttcactaacgctccgtcatttaccaccctgccttgcaaaaaaaacattgcccaaggcatctataccatgcgtaaaatgacctcggcgaccttgccaccaacagctaccctatatgtatatgtgcgcatcctccaacagccagtatcacttcctgataaacgtaccatggtgatgcgtcccggaacctcattcgatttcgagtggtcaacactccgtaaagcatacggtcaaaaagctttgaacatggaaattgtacaaacagacggttattataatgtcttcccttataacatacaagaagtgacatacaattatcttggtacacaaacgttacctgaaaagaacaataaatagtaatatgaaactaaaaaatatcattctgactacattggtaacaatcgccctgacatcatgttatacatccagtcgaataagtaaattcagctctgaaaatataaaattggtatagataaaatcttttcataaaaagatatggaaagccttttaataaggaaatatcctatatacaagacaatcaagagaaagaaaaactcttctataaagaagaattaaacaaaggtacatggtatattataacaacagcttttacttttattgatgataaacttataaagcaagaggttgtaaaagaagaaaggacttttcaaaaatgtgattgtaataaataataagtaatacctttgctgacagtattgatataaaaaaactattacacgatggaaaagaaaattgtactcatcaccggagcctcctccggaataggggaaggctgtgctcgcaagtttgccatgaacggttaccggcttatactcaatggccgtaatgtggagaaactgaatgctgtaaagaaagaattggaagaaaaattcggagccgatgtgtatctgcttccttttgatgtccgcgataggcaggctgcttgtgccgccctcgaatcccttccggtggagtggaaagcgatagacatactgattaacaatgccggactcgtcatcggagtagacaaggagcacgagggtaatctcgacgaatgggatgtggtgattgatacagacgtgaaagcgcttctcgctatgacccgcctcgtagttcccggcatggtggagcgcggacgcggtcatgtcatcaacatggggtctattgccggagactacgcttatccgggcggcagtgtgtactgtgcctgcaaagccgccgtcaaggccctttccgacggactccgcatcgacttggtggatactccggtacgcgtgacgaacgtcaagcccggactggtggaaaccaatttctctgtcatccgtttccgtggcgaccgggaggcggctgacaatgtatataaaggtatacgcccgctgaccggtgacgatatagccgaagtggtttattttgccgctgccgtccccgagcatatccagattgcggaagtgctggtgatgcctgccaaccaggctaccgggacaattgtcagccggaaatagaatttgtataagaatatgataaaatgatactattttatcttcggggaaacgtctacatttgcccacagctaaatgattatagaatctaaacaagaaaagcatgaattttaagaaacgaacaaatttcctttttggagcactgctgctgaccggcagtttgttggctcaaaacgtatgtgtatccactccgaaaacctctttggtgctttcggctcctgaaggcggtacactgagacacttgtattatggtaacagactttctgaaaccgatttgctgaatattgccacggcagaagcaggccacacggcctatcccgaatatggattgaatacccccgtggagacggctctcgctgtgaagcatgctgacggtaacatgaccctccagcttgaagtgctgaatgtgactaccgagaaggaaggaaatgccgtgacgactgtcgtggcgctgaaagacaaagtgtatcccttttttgtcaatgtctgctaccgagcctggcaagatgccgacgtgatagaatcttggactgaaatttctcatcaggagaagaagccggtagtgctcaatcagttcgcctccggctatctgcccattcgccgcggcgatgtgtggctctcccatctctctggttcctgggccaatgagggctttttgacgcaggaacctctcactccgggcatgaaggttatcaagaataaggacggtgtgcgaaattctcataccgaccatgcggaagtgatgttctcccttgacggccgtccgcaggagaacatgggtaacgtgattggcgcagccctctgttacagtggtaactacaaactccgcatcgagacgcatgatgatgaatatcaccatttctttgccggaatcaacgaagagaactctgcttattccttgaagaaggacgagcttttccgcactcccgaacttgccctgacttatagtaacgagggattgagtggcagcagccgtaacttccaccgctgggcgcgtctgcacaagttggcacacggcactactccccgtaagattttattgaacagttgggaaggcgtgtatttcgacatcaaccagcagggtatggaccaaatgatggcggacatcgcctccatgggcggcgaattgttcgtgatggacgatggctggtttggcgacaaatatccccgtaagaacgacagttcatcactcggcgactgggtggtggacaagaacaagcttccggacggtgtcaaagggctgttgagtgatgccaaaaagcgcggcatcaagttcggtatctggattgagccggagatggcaaacaccactagcgaactttacgaacaacatccggattgggtgctcaaagctcccgaacgcgacctcgtactgggacgcggcggtacgcaggtggtgctcgaccttgccaatcctgccgtacaggacttcgtgttcggtgttgttgacaatctgatgacttcttatcctgagatagactatatcaaatgggatgccaatatggctgtcatgaaccacggttcccaatacctgaccaaagaaaatcagagccacatgtatatagagtatcatcgcggctttgagaaggtgtgccagcgcatccgtgccaaataccccgaccttaccatccaggcatgtgccagtggcggtggccgtgccaactacggagtgctgccttacttcgacgagttctgggtgagcgacaataccgatgccctgcaacgtgtctatatgcagtggggaacttcctatttcttccccgccatagccatggcatcgcacattagtgccgcccctaaccatcagacattccgtaccatccctctgaagtaccgcatcgatgtggctatgagtggccgtctgggtatggaaatccaacccaagaacatgacggaagaggaaaaggcgctttgcaagaatgccattgccgagtacaagaccattcgtcccgtggtacaattgggagatatctaccgcttgatatccccttatgacaagcagggtgtggcttcattaatgtacgtggctccagagaaggatagggcagtcttctattggtggaagacggaacacttctgtaaccagcatctgccgcgtgtgaagatggccggtctctgtgccgacaagcaataccgagtacatgagctgaaccgcatagataatgttcccttgaactacgaaggaaaggtcttcagtggtgcctaccttatggcaaacgggctggagattccatacaaccatagggtggactaccacaagcagaacgactattcgagccgtgtgctttatctggaagaggtgaaatgacgtgaacaaaggtgaggtttagtcgcgtaaaggtgaacttgagcagtgtaaaggtgaggttgatgggtacagttggtacagtgggtacagcggtccttttgcctcacacacgcatgtatataaataatgtacgcgttataaagcaatgtacataagcgcatgtgtgtgaagcagaagaaacgctgtacctactgtaccaattgtaccactgtttggatgtccaatcttttcttttcgtggtaagatggaaacataaaaaagtcctacaatacgttgatattgtaggacttttttatgtttgtagccttctggcttttttctctgtgaaccgcttggggctcgaacccaagaccccaacattaaaagtgttgtgctctacctgctgagctagcgattcaatcctttagtgctgttaagcgggtgcaaagatagatacttttttgaaatttgcaaaataatatcatcttttttcttatctttgtccccatcaatccttgatattaatcattatcactgaacattaatcattaaatacatggcaacagtagacgataaaaagattatcttttctatggttgggctgaataaaaccattcagcagaacaacaagcaggtactgaagaacatttacctttcgttcttctacggggcaaaaatcggtatcatcggtctgaacggttcgggtaaatcgaccctgctgaagattatcgccggattggataagtcctatcagggcgaagtggtgttctcgccgggatattctgtggggtatctggcccaggaaccgtacctcgaccccaccaagaccgtaaaggaaattgtaatggaaggcgtgcagcccattgtggacgcgctggcagaatacgaggaaatcaatcagaagtttggcttgcccgaatattatgaggaccaggacaagatggacaagctcttctcccgccaggccgagttgcaggacatcattgacgcgaccgatgcctggaaccttgacagcaagctggaacgcgccatggacgccctccgttgtccgcccgaagaccagtccgtagaacatctttccggtggtgagcgccgccgtgtggccctttgccgcctattgttgcagaagcccgacgtgcttcttcttgacgagcccaccaaccaccttgatgccgaatccatcgactggctggaacaacacttgcagcagtacgagggtacggtgattgccgtaacgcacgaccgttacttcctcgaccacgttgccggctggattcttgagctggaccgtggcgaaggtattccctggaaaggtaactactccagttggctggaacagaagaccaagcgcatggagcaagaggaaaagaccgccagcaagcgccgcaagacgctggaacgcgagctggagtgggtgcgcatggctcccaaggcccgtcaggcaaagggaaaggcgcgtctgaactcctacgacaaattgctgaacgaggatgtgaaggagaaggaagagaagctggaaatctttatcccgaacggtccccgtctgggtaataaggtgattgaagccaagcatgtggcaaaggcgttcggtgacaaactgttgttcgatgacctcaacttcatgcttccacccaacggtatcgtgggtatcatcggccctaacggtgccggtaagactacgcttttccgtcttatcatgggactggaaaaggcagacaaaggcgaattcgaggtgggggagaccgtaaaggttgcctacgtggaccagcagcacaaggatatcgaccccaacaagagcgtatatcaggtcatttccggcggaaacgatctgattcgcatgggagggcgcgacattaatgcacgcgcctatctgtcccgttttaacttctccggtgccgaccaggaaaagctctgtggggtgctttccggtggtgaacgcaaccgcttgcatctggcgctctgcctgaaggaggaaggtaatgtgttgttgctggacgagcccaccaatgacatcgacgtgaatacgctccgtgccctcgaagaaggtttggaggactttgccggatgtgctgtggtcatcagtcacgaccgttggttccttgaccgtatctgtacgcatatcctcgctttcgaaggagactccaatgtgttcttctttgaaggttcttattcagaatatgaggaaaataaacagaaacgtcttgggaaagaagaacccacccgtgtacgttatagaaagctcatgaatgattgatttcggtgcgaatttgaaagtatattcttttacttgttgacaatacgaaagccctgctgtagaatgcagggctttttttgtttaaaaatatctcaaaaaagcctttctaccttcaaaaaatgtaacataaatataacattaatctcgtttttattagttatatttgcgacttaaaacataaattaatgtttaattaatactatctattaacaaaaaacagaattatgagaaaacatctaattcaattcctgttggttgcagtgttgtcggtatttagtgccgctgcatttgctcagactacagtgagaggtcagcttgttgattcagaaacaggtgaaccgttagtgggtgctgccgtcatggtggaaggtactacacaaggatcggtgaccgacattgatggctatttcaagcaaagcgttgcttcgaatgcgacattactattcaagtacgtgggttataaagaccagaagaagaagatcacgcagaagggcgcttctgtggatttgggtgctatcccaatggaaccggatgctgtgatgctgaaggacgtagtgattacatcgtcagtggcagttgcccgtaagactccggtagcggtgtcaacgataaccccggtgtttattgaagaaaagttgggtacacaggaattcccggaagttctgaagtctactccgggtgtttatgttacaaaagacggtggaggttatggtgatgcacagacccgtgtccgcggtttcgacagcgagaacgtggctatgatgattaacggtgtgccgatgaacggtatggagaatcagaaggtatactggtccaactgggccgggctggctgatgtgacaagttccatgcaggtacagcgtggtctgggtgcttccaaagtttcttctccggcagtgggaggttctattaacgttattaccaagagtaccgatgccaagaagggcggatttatttcttatggtatgggtaatgatggttacaataagattttgttcagcgtatcttccggtttgagcaaggacggttgggcatttactttgctgggtggaaaaacttggggcgacggatatatccagggtacggattttgaaggctataactattttgccagcctttccaagcgcttcaatgacaaccatcagttgactctttctgcttttggtgctccgcagtggcacaatcagcgtaactataacaatgcactgaccattaaagaatggcagcgtgttcagcaattcatgggcgagaagagtgcctatcgttataatcctactttcggttatcgcaagggacaagccttcaattcaaaccgcaattcctatcacaagcctcagatttccttgaatcatttatggcagattgaccataaatcaagcttgagtacagctctttatgcttctattggccgtggtaacggttacagcggtactggtacttctgcttatcgtagcaagtggtatggtgccagcaacggatataccaacgatgaattccgtcttgccgacggtactttcaactatgatgctgttgatgcgttgaaccaggcaagtaccaccggttcgcagatggtgatgggcaaggccatgaacaaccacgaatggtacggtttgctttctacttatacaactaagttcggcgagtatctggacttctatggcggtgtcgacttacgttattacaaaggcttgcatcagaacatcattaccgatttgttcagtggctcttatttcattgattccaatcgtgacaatgtgtctgctgccaataacattgctgctgctgacccgaattttgccaagaagaagttgggtgtaggtgacgtggtttaccgcgattatgacggttatgtaatgtccgagggtgcgtttggtcagttggaatacaatcgcgacaagttgagcgctttcgttgccggaggtctgtcaaataccagctattggcgttacgaccgtttctattatgacgaagcccatgccaagagcagtaaaaagcactatctgggtggaaacattaagggaggtgccaactataacctgaacgaaacgcaaaacatattcttcaatgcaggttttattacgcgcgcgcctatgttcgatacctctttcatcaattcacagaattcccacgaccgcaaccaggatgccaagaacgaaaaggttatgtcgttcgaggtgggttacggttttcgcaatagcttggtggctgtcaatctgaatgcttattatacgcagtggatggataagagcctttacgactcttatacagcacgtgacggcagccgtgccactctgaatatgaccggtgccaatgccaagcacatgggtgttgaggtggatttcaatatccgaccaaccacttggatgaccatcaacggtatgttctcttggggtgactggcgttgggacggacttgctaccggtttctactacaacaatgaaggacagatgtacaatccgaagacagaagaggtgattgctgccggtagtgccaatgtagaagactatcgttataacattcgtatggatgatgtgaacgtaggtggttctgcacagactaccgctgctctcggtgtgacggtgcgcccgatgaagggattacgtctcggcctcgactggaactatgcagcgcgtctttttgcagactatgacatcgaagctgaccaggctactccgggcaaggaatatcaggtggcaaaaccctggaaggtaccttcttcttatacgtttgacttgaatgccggctatacgtttgattttggtaaagtctccgctactttgagcggcaatgtcaataaccttttcgaccaggaatacatcgccgacgcatgggatggttccacttgggaagatgcgatggtgctctatggtttcggacgtacgttctccgtaggtttgaaggttaaattctaacttaaacagacattaacgatatgaaaaataaatattatttatatggattgtttgcagcggctctcacattgaccggctgtgactacaacgaggatcattttccgggctacgacgagctggcccagcccaaagatgtgtggaacgataccatcacattggcagatgctgactataaaacaatcgccggaatagaggcaaataaagaactggccctttccaaggacccggaaggagagaccttcaaggcggctttggaggctgtggcaggcaataaatatttcaccgaagaggctcctgccgtatggtatctacctgcgtacattgccagcaagtatccttatatggacgacaattccaaggtgacggttcattataagaattatgagaatctgccagaatatctcaaggcattcaacgggatgaaggcatatgacatgaacagcgatgactataaggtggtttggggagataaagtttctgtatcttatatttctccgtctactttgaacaagattcctgccgcattgaaggagggggttgccaaaccggccgatggtgaaatacgcatggttaactatgcttattctgaaaccgaacccagctttggtggtggggaaggtgaaccggaagtgacctacacgcctatttcggaggttgttgccggagaaagtggaggtgagtacaatgtgaaaggtgaggtgattgccacttacggccgtggtttcttgttaaacgacaagaccgcatccattttggtttatctgaatgccccggccaattactctgtgggcgatgtggtgaccgtaaccggcactacatccaagttttcaggattgatgcagttcccccaaagctctacggtgactttgatagaacgtagtgaagagttcgcttatccggcagctcaggccatgactggtgccgagatggacgcatggactgcaagtgctgctgtgaagtatgtctccattacgggtaagctgactatcaataaagagaaaggctattataacctggtcgtagatggagcgacccgtcaaggttctctctcttatccggtagctggtttggtagatgatgctttggacggacagaacgtgaccgcaataggttatctaataggttacaacggtagttttgtgaacatgatgaccacttctgttgttgccgcaggcagtcagagcgaatatacaccggtaggtgttgtggctttgtcggcagcaggcgattataaggtaaaaggtacagtggcagccctctatggtagaggcttcttactgaatgatggtaccggctctattttggtttatctcaacaaagagtccgaaaacaaggtaggagatgtggtgactgtatccggaactacgagcgcttatgccggattcatgcagtttagtaaaaacatccaagtagaaaaggtaggggagtctgctttcaaatatcctgctgtccgcactttaacaggtgccgatatggacgcttatctggaaatgccatatgtggcttatgtggaatatgtaggaacgctcaagattgagggaaattatctgaatgtgacgattgacggtgcagaaactgctgtgggaagtctttcctatgctcaggtagaccctgccttggatggcaagaaagttgtggttactggctactccattggtgtcagtggaggcaagttcgttaatacaatggttgttacggtgaaagacgctactgcggctgctaaggcttatgctgccgttacccgtgctgctgtcaaggcaaatacttctgctctctatcgctacaatgcctcttcccagtcttggagcaaatactctacagatgaggccgaagttgccgttttgcaacctgtcgactatgacaagatgggatactcttacgtcagcaagcctgcagaaacaatgccggtttatttgaaacaagcttatccgtatgccaagatagacgatgtggtagctgtggcttactatgcagacaaagacggtaacctggctgtgacagaattcaagtttgacggtgctacttggacagaaacaactattgctgtgccaactactattactttccagaaagcaaatggcgaatgggtggaagctcgtgtatattttgaatccacgttcctgggtggtgacggcggtggctttgtagccgaagacatcgagttgtccggactgacaaagatctggtcgcttgaaagctcttacggatggaaaggcaccggtttttcaagtgagaacaaaaagactgaaagttatctggtatctccggaaattgatttgagcaaggctgctgcaccttctgtcgtgtttgattgtgctatcaactacttgaagggtgctgagcgtagtgaaaacttcaatctgttgatttctaccgattatgcaggtgatgcagcttcggcttcatggaaaactctggacgttaccggctggccggccgaagattcctggacattcgtaaccgtagagcccttctctttagcagattacgtaggaaagaaaatccgtctcgctttccattacaagagtacgtcgactacagcttgtacggtagaagttaagaacatgtctgttaaggaataaacggatagaaatatgtgaaggaggagttggggcataggttcctctaactccttcttttgttttggataagatattgtaaaactattcaaaaaaatatttgacgaatgaagaaattgtctttgatgtttttattactagtggcaggactcttttttactgcttgtggtgatgattccgatgtgcctgccaatgggtatatcgaaactaccgaggaaggctcggcaacatttatattgaagggttatgaggatgcttctgatggcttcaacgtgtttgagggggaagggtttgagaaatctttctatattttggagaagaagtttacgggaagtgcatggagctttgtgagggctgcaagcggcccgttgtctgccatgaccgaaattcctgccgataatgcctggcaggtagatatggatgtggtagaaggagccaactactgggcacgtaacaaggggatgacgaaatatacattcatgaagatgcgggtggcttatatcgagggaaacaatgtcgctttggaatatgccattgccggtaccaaagatcgtgatctttcggagaatgaaaatgccaatcagccgcagggtgacaacatttccatgaccgcgttggaagttcctttcctgaatcccgatcatatctatgcagactactttgtgacctataaggataaacaggtgcagaactttgttctggagtatgtgcccgaaaagaaacattccgcttgggtggctttctgttttgacagtgtgactagtcaggacaatgtgaagcggacagatgcttggaatcaagatgaccccaacatcgacaattccgtggaaccgaatgaaagtatgcacaagagcgatggttacgacaaggggcacctctgcgccagtgaggatcgcgtatattgtgaggatgccaacaaacagactttctactacaccaacatctcaccgcaaatagcctcgttcaaccagaagtactggatgtatctggaacagcaggtgcagaagtggggacgctctacgcgtgaaggtacttatgataagatgtatgtagtgaagggtggcacgctgaacaagctgcttaccaacttcaccggcacaatgaagggtggagacagtaaatatcctgaaaccgatgctgaaggatttaccatccacggactggcagtcccagcctattactacatggccatccttgcggagaagggtgatacctaccatgccatcgccttcctggtgccgcactccgaactcctgccgcagaaacctacggccgacgatttccaggtatatgccgtgagcatcgacaaactggagcaggaaaccggcatcgacttcttctgcaatctgccggatgtaattgaagacgaagtggagaaggcttacaacaaagcagactgggcctggtaagcttactgatataacaagaaaaaaagggggactttccattgatggagagtctccccttttagtatgacgggcatgtcatgatttagatagctttcttaaaagctgttgtcgttttgatggaaactgacttcttatctgtatctttgcgcattgattaaaaaagagatattcatggaactttcggatatacttcataacttgaagatacaggaactcactccgatgcaggaggcggctaaagaagcctatcaatcagccaaagatttagtgcttctttcgcctaccggttcgggtaagacactggctttcctccttccgctggtgcagactttgaaagcggaaatacaaggtgtgcaggctcttgtactggtaccttcccgcgaactggctttgcagatagaaactgtgttcaagtccatgggaactccctttaaggccatgagttgttatggcggacgtcctgccatggaagaacatcggacaatgaaaggcattcatcctgccgtcattatcggtactccgggacgtatgaacgaccatttgaggaaagagaatttcaatgccgccactgttgtcactctggtgatagatgagttcgacaagtgtcttgagtttggttttcatgacgagatgacggaggttatcggacagcttccctcactgaaaaaacgtgtgcttctctcggccaccgatgcagaggaaataccgcaatttgccggagtaggaggtgattccccgtcttccgtctcccggttcatgaagcttgattttcttgctccggaagctcttgctccgcgtttgcggctgcacaaggttatttctccggagaaggacaagctggagaccctctataacctgctttgtactctcggctatcattccaccttggtattctgcaattatcgtgaaagcgtggagcgtgttgttgggtacctgaaagccaggaagttcccttgcgacatgtttcatggcggtatggagcaacccgaccgcgaacgtgcgctttacaagttccgcaatggcagttgcgccgtactgatatccaccgaccttgccgcccgcggacttgacatcccgggtatagacaatgtggtgcattaccatctgcccataaacgaggaagcttatacacaccgtaatggacgtaccgcccgctgggaggcatcgggaaatgcgtatcttgtcctgcatgccgaggagcgggtacccgagtatatctctgaagacatcgcaatgtacgagtttccggaggcgcttcccaaaccggccaagccccgatgggctaccttatatataggtaaagggaaaaaggataagttgaacaagatagatattgtcggcttcttgtataaaaaaggagggatggtgcgtgaagatgtcgggcaggtggacgtaaaggaacactatgcctttgtagccgtgcgccgcagtaaaatgaaacaattgttgacgctggtacgcggtgaaaaaatcaagggaatgaaaactgttatcgaggaagcaaagtgatttatcttataaatattcattttatttgcgcttattcttttgaatatgaagtaatgaaaccgccttgcttttagtttctctaaaagtattatccttgataagtaaagataacaaaatggtgcatatatcttgtataaaccattaaaaagtaagctaaatgtggcttaaaaatagaatttcatcaggaaaggtttgttttgaagaaatatttccgtaatttcgcaaagtcgaaagacattaatgaacgaaattgtataaccaaaacaaacttcaaatgaaaaagcataatttcaatgcaggaccttctatccttcctcgtgaggtgattgagaatacggcacaagctattcttgatttcaatggctcaggcctctcactgatggaaatcagccaccgtgccaaagacttccaacccgttgtggacgaagctgtggcattattcaaagaattgctcaatatccccgaaggatattcggtactgttcttgggcggtggtgccagtttggaattctgcatggtacccttcaacttccttgaaaagaaagctgcttacctgaatacgggtgtatgggccaaaaaagccatgaaagaagctaaggcattcggtgaagtagttgaagtcgcttcttccgctgaatctacttatacttatattccgaaggactatacagtgcctgctgatgcagactatttccacatcactaccaacaatacaatctacggtacggaactgaaagaggatttggacgtaaacgtcccgatggtggcggatatgtcttctgatattttctcccgtcctatcgacgtatccaaatatatctgtatctatggtggtgcacagaagaatctggctccttccggtgttacattcgtcatcgtgaagaatgacgcgctgggtaaggtatctcgctatattccgaccatgctgaactatcagacgcatgtggatagcggctctatgttcaatactcctcccgttgtccccatctatgcagccctgcagacattgcgctggattaaggcagagggtggcgtgaaggaaatggaacgccgtgccatcgaaaaggccgatatgctgtatgctgaaattgaccgtaacaaaatgtttgtgggtacggctgccaaagaagaccgttcacgcatgaacatctgctttgtgatggctcccgaatacaaggaactggaagctgacttcctgaagttcgctaccgaaagaggtatggtaggtatcaagggacaccgttctgtaggcggattccgtgcatcctgctacaatgccatgccaaaggaaagcgtgcaggctttgattgactgcatgcaggaatttgagaaacttcattaataatattgtttttcaccacagattacacagatttgcacaggttgtttttatgattaaactctgtgataatctgtgtcatctgtggtgagtctttttaatatcatgaaattatgaaagtattagttgcaacagacaaaccgtttgccaaagtggcagtagacggtattcgtaaagaaatagaagcagcaggttacgaactcgtgctgctggagaaatatggtgaaaaagccaagctgctggaggctgtgaaagatgccaacgctatcattatccgcagtgacatcattgatgccgaagtgctggatgccgccaaggaactgaagattgtggtgcgtgccggtgccggttatgacaatgtggacctggaagcagctactgcccacaatgtatgtgtaatgaatactccgggacagaactccaatgctgtggccgagttggctttcggcttgatggtgatggctgtccgtaatatgtataacggtacttccggtactgaactgatgggcaagaaactgggtatccacgcttatggtaacgtgggtcgcaacgtagcccgtattgccaaaggtttcggtatgaagatttatgcgttcgatgctttctgtccgaaagaagtaatcgagaaggatggagtgaaggctgtggattctgccgaagaactttactctgcttgcgacgtcgtttccctgcatatccctgcaactgccgaaacgaagaattccatcaattatgcattggtgaacaaaatgccgaaaggtggcctgctggtgaacacagcccgtaaggaagtcatcaatgaagccgagcttatccagctgatggaagagcgtaccgacttgaaatacatgaccgacattatgcctgctgccaatgaaacatttgcagccaagtttgccggacgttatttctctacaccgaaaaagatgggggcccagactgccgaagccaatatcaacgcaggtattgccgctgccaagcagattgtaggcttcctgaaagacggttgcgagaagttccgcgtaaacaagaaatgagatgaatagtaagactattctcaataatccatataaaacacacccttatggctataataaaaccctttaaggggattcgtccccctcaggatttggtggaacaagtagcgtcccgtccttacgacgtattgaattctgcagaagcacgtgcagaagcggaaggtaatgagaagtccttatatcatatcatcaagccggaaatagattttcccgtcggtacggatgaacatgacgaacgtgtttatcggaaagctgcagagaactttcgtatgttccaagagaaaggctggctggtgcaagatgataaagaaaactattacgtctatgcccagaccatgaacggcaagacacagtacggtcttgttgttggtgcctatgttcccgattatatgaacggcgttatcaagaaacacgagttgactcgtcgtgacaaagaagaggaccgtatgaaacatgttcgggtgaacaatgccaatattgaacccgtgttctttgcctatcccgataatgctgcgctggatgccatcatttcccgttatacagccgggaaaccggtatacgactttatcgctccgggtgacagtttcggtcataccttctggattatagacaagcaggaggacattgatgccattacccaagagtttgcccaaatgcccgccctctacattgccgatgggcatcatcgcagcgccgctgccgctttggtgggtgcagagaaagccaagcaaaaccccaatcaccgtggtgacgaagagtacaattacttcatggccgtgtgcttccctgccaaccagttgactattattgactataaccgggtggtgaaggacttgaacggcatgactcccgaagagtttctggccgctgtgggcaagaatttcatcgtggaggagaaaggtgaggacatctataagccgtccggactgcataacttttccctctatctggacggaaagtggtacagccttactgccaaaccgggtacttataatgataacgaccccattggtgtactggatgtaaccatctcctccaatctgatactggatgaagtgcttggcatcaaagacctccgttccgacaagcgtatcgactttgtaggtggcatccgtggtttggaagagttgaagaagcgggtggacagcggtgagatgaaagtggcattggccctctatcccgtttccatgaagcagctgatggacatcgccgatacgggcaacatcatgcctcccaagacaacttggtttgagccgaagttgcgttcggggttggtgattcataaactggactaaatgaattgatataaactgaaacggggatgtcttccactaaaagacatccccttttttttcggattaaaacagaataataaggttattatgtagaaaatgccgacctttgccgaaaaattgagagtatacaatgaaggtattgattcttaacggtagtccccgccgtcatggcaacatgtcgaaaatgttggagctgatgaagcaggaacttgaaggttgtggagctgagactgtttatatagacgttccgcggttgcaggtacatccctgcatcggttgcatgaagtgtcgcagttcattgaagtgttgtctgcccgaggatggggcacagagagtgttgcagtctatgaaggaagtcgatgcactgataatcggtgctccttgctattggggaaacatgccgggagaagtgaaagtgcttttcgaccgtatggtttacggcatgatgggggagaactcctggggaatgccccttccgcttcataagggtaagaaagcgattgtggtaagcacttgtactaccccttatcctttcaatattctctataatcagacgcacggtgtggtgaaagctttcagggagattctgaaatggagtggtttcaagattgtgaaaaccattgagaggggaggtactaagaagcatcctgagctgacggaaaaggatatgcggaactgcaagaaagcagtgcacaaattattgtaaagtattgaaaaagtcaatatgagtagaaaagaagaatataaattgcagaacgaacagtttctagagcagttgcgtacggcagaaggaatcaaggaattgccttgcggcatactttatcgggtattggaggaaggcagagacggtctgacaccacgtctcaacagtgtagtatctgtacattataaaggcacgcttatcaatgggcgtgagttcgataattcgtggaaacggaattgtccggaggcttttcgtctgaatgaagtgattgagggctggcagattgccttgctacgaatgcatcccggaagtcgttggattgtatatatcccttacaccatgggatacggtacacgtaccagtggacccattccggcgtattccacactgatatttgaagtggaattactaaatatctcgtgacactgctgaacaatttgcttttttatcttgttctcatataagaatttagaaaaactcaataggtatgaatatagataagaaagcagggcatattgacccgaaagtagcattgtcccaggcagaacatgaaaagggaacagtacccggacaacagattggcctttacggtaatgcagacaagagagatgttcgtcaggtcgtaaagattctgaatcctgacaaaaacagtatggagagcagaggttaaccctctgctttttttattacatgcctctttcttcgtcgagtccagatgatttgttggagggttttgtatctttgtacccggaaatgaaactcttaaaaacaaaagcaggatgctacggaaaggagacctcactcaaggaggcataaccggtactttattacgttttaccctacccatgatggtagggtcttttttgcagcaatgctacaacattgcagatacgctcattgtaggccaatgcattggtgcaggggcgttggcggcggtcggttcggcatacacattgatggttttccttatatccgttttgctgggactggcgatgggcagtggcactgtgttctctttacattatggtgccggaaaccatgtagcactgtgtcgtagcatattcagttcgtttgtactgataggtatcgtgacactgatactgaatgtagccgtttttatctggctcgatcctattctccggctgttgcaggttccgcaagacatatacggcatgatgcgcagctacttgtggataatcttctgcggtatagttttcacttttatctataacttctacgcatctctgctgcgtgcagtaggggattctgtcactccgctttggtttctggcagtttctgtcgttctgaatatagcgctcgacttgttttttatcctacaactggattggggaattcagggtgcggctgcggccactgtcctcgctcaaggagtagctgctctgggtatcatcatttatacttacagaaggcgtccggaactgcgatggcatcatgaagacatgtgttttgaccgtacttgcttgaaggaaatagcttccttctctacactgacttgcatccaacagtcggtgatgaatctgggaatcctgatggtacagggacttgtcaacagctttggaacagcggtaatggcagcttttgcggcagctgtgaagattgactctttcgcctatatgcccgtgcaggaatttgggaacgccttttccacctttattgcacagaactttggggcagcacgttacgaccgtatccgcctgggtgtttgcagtgcatttgtcacagcggttgttttctcactcctcgtgtccgtgctggttttcgtgtttgccgagccactgatgcttatctttgtccgtccggacgagacggagattattgcggtgggagtggcgtacctacgcatcgaaggggctttctactgtggcatcggcatcttatttttgctgtacggatactaccgggccatccgtatgccgggcatgtctgttgtgctgactgtgctgtcgctgggtacccgtgtcgttctttcctactggctggcctcgatgcccgaggttggggtgacgggcatctggtggtccatccccatcggctggctgattgccgacgtggtcggcatctggtactatcggtacaagaagttccgttttcaggaatctaaggcatgatgcggcaaatttgctccactgtccttcggatattttcttgagcaaattcaggctgcatggcctgctctaaagagatgggagaggggggaatggagaatacgccccggaatccggctgcattcagtatcccggcatcctctatcgctcctgccagcaggatgacgggaatatgttgcctccttgcttcctgcaagatgcccgaaggtactttccccataagagtctgccggtccgatttcccttctccggtgatgaggaggtcggcatccttaatcttttctgcaaagtccagagtttccaaaagaagctctatgccgggtttcaactgtgcatccagaaatgcgtggagaccgccccccataccgcctgccgcaccagcaccgggatgcaaggatacgtctttgccggtagtgcggaatatgacgtccgaaagatgctgcatagcaacatccagttccttcaccatatccgcgtctgctcctttttggggagcgaatacgtgggctgctccattgggaccgaagaaaggattgcgtacatcacacgccgccgtgaaacatgcctttttcagtgcgggatgggcagaagagctgtctatggagctgatttccgatagaagggcaccgcatagggcgatgcctttttccatgcttcccacttcgtgtccttctttatcgaagaaacggaatcccaatgcttgcagcattcccagaccggcatcgttcgtggcgctccctccaagtccgatgacgaaacggaggcatccccgttccaaggcatcgcgtatcagttcacccgttccgaaggtggtggttttcatcggattccttttgtcggcaggaaccagtggcagtccgctgatggcagccatttctacgaatgcggtattgccgtctccggagataccgtaactggcatcgcacggttgcatcaacgggtcgtgggcacggacggtgatacgttttccgttactggctgcaagcaggacgtcgagcatgccttctccaccgtcggccacggggagcacgatggtccggcattcgggacatgcggcatgtaccccttgggcggcagcttctccggcttctgccgaggtgaggcatcctttgaaggaatcgatggcaatcactatcttttgaggcttcattttaaataactggtagtctattttctggaggatcgatccagcctgcagatacatgttcttaggttgcggatatctgttttaagtgcgaaaataaagcttattttcaatacttacaatgtttagttcaaatagtttgaaactttcttcagatgatttggaagtcctttgttaaatgttagagaggataatttgacgtttttgtcatgtctattttcgtaggaaaaaaagttagataaaataaactatcgatacttatattctttggtacgtaaaattcttaaaaagaagagcgagtaatagtagaaaataatatagtttcactgaaaaatatctatttttgcggtagatatacttttatgaaggttttcgataggtatattttcatatgaattgtctcaaaagtgagtaatattagtttaatggtcgataggtttataaaaataataatttatgctatatcattatacatcattagcaacatttgcgttgattttgacaacaaagtctattaagtttaatcgcttggatttagtagatgatccggatgagagtttgtttggctatggggatagcgacatgaaattgaattcatcttcgtttgtttcgtgttggacagaggataaagtagagaatattgctctatggaaaatgtatacagacttgaaaggagtgagaatcgggcttgacaaggatatgtttgttgtatataaaattaatgataaaacttcttttcttaaagaaagattctatcgtgatggacatttagcagtaaatagtgatatgaataatacagaaccttgtaatgtagagtatgatttaaaagatgataatgatgctgttaaatgttataaagaatatgctgtttcttgtaagaacggtgacattttgcttcatactaatgaaatagggattcataaaaagaagtattgggattttcaaaaagagacacgtttcataataaggggaatgtctgttaatgaaaaaggagctattatagatagacctcttgaaagagaatctttttatataccgttaaaatgggaagctatgaaaaaaatgcaagttgttttaggacctaaagcaggagaaggtgaaagagctatagttgatgctttgctctataaaatttttcaagatgatcatgatattgatgtaaaaaagagtgttgtaaggattagataatgatagaattttacctaagtttgtaaatgacatttggctaaaataaaatttgaataaccaagagatagaggttttacagagaattttcaaagaacgtcagtcaacatccaaagtgtttgtacattctaaaagcatttggaaaaagtgatgttgacatatgtgttattgtgatggcgaaagtgttctagtctcttacaaaaggctttcatcaaaggattgtttggttataaggaagtaatgtccacttctatgacaactatattggaggaaattaagtgtggcttgcaagttactaaagctactctcaaaattattgctgtaagtactggtgaatcggaattgacatatgatatgcgtgagcaagaaaaatatgagaatctgttggcacatatttattgatatttcactcttttttatcttcttgatggagtagagttttttgttccaatggatgaagtccggcagattaaaagttgcggagaagttgtcagagctacatgacgaactacgtacatgtaatgattttagtagtccaagtgaacttcgcaatttgaatatttttatcacttgtctgttcttttgcttttttaccgaagacataggcttttttgtgcatgactaattcactggtgtaaggacataacagcgtaaaaatctcttttcttatttctaccacttttgattttgcattatctttgcagcatgagcgaagatacgtataaaaccatcgttgccccttctgagggcatttacactgaaaagcgcagcaagttcattgctattgccctgccggtgcgtacagtagaggaggtgaaggcgcatctggaaacttaccagaagaaatattacgacgcccgccacgtgtgctatgcctacatgttgggccatgagcggaaggacttccgtgccaacgacaacggcgaaccatcgggtacggcaggcaagccgattctgggacaaatcaattccaacgaactgacggatatattgattatcgtagtgcgttatttcggaggcatcaaattgggtacgagcggactgattgtagcctataaagccgccgccgccgaagccattgctgccgccaccgttattgaaaagaccgtggatgagacggttaccttccttttcgaatatcctttcatgaacgatgtgatgcgggtggtgaaggaggaggagccggaaattctggaacagtcgtatgatatggactgccgtatgacgctccgcatccgtcagtccatgatgccgaagttgcgggcacggttggagaaagtagaaacattgaggtttgaataatacaacaaatgggataagagccccttttaatagggaagttgttcgtttcctttaacggaacaagttgttttcctatgaggaacagactgttttctttgcggaaacggtaccacttcttatgaaaggctgactccccccctttaaacaaaagaaagtttatggcatttagtgcaacaaaaagagaactgggcgagctcgagggcactgaaaaagtcccccatatagtagcgtcctaaaaaaatcggcacatattcaggcaaaagcttgagtatgtgccgatttttttgtaactttatggtagtaatcagacagatatgctaccactacaacagactatacagttcagtaattattcggatctatacgatttgattattcctcgtaacaacctattgcgtcagataaatgatttgatagacttttcttttattaaaaaagaactcgttgacaagtattgtcaagacaatggaaggatggccgaatgtcccatccggatgttcaaatatcttctgttgaaaacaatctatgacatatccgatgtcgatgttgtggaacgatcaagatatgatatgtctttcaaatactttcttgggatgagtccggaggaaacagatttgattaatccgagctcattatgcaagtttcgcaagttgcgtctaaaagataaagatctactggatttgctgattggcaagactgttggcatagctatagaaaagggcataataaagtctcgcacgattatagttgatgccacccataccggctcacgcagcaatccttggtcacccttggagagtctaagattgcgctcgaagcaattgcgcaaaagcatatatgatgccgacgagaccgaaaagagcaatctgccttcgaagaacacggatgacaacattgagcatgagcttgactatacaaaggcattgcttgatgtagttagctcaaatccctcattggcagagatacccaaggtcaaagagcggctgaatatgctcaaggaggtacttgccgatattgaagaccattatatgacatcaaaagatgaagatgcacgggtgggtcacaagagcgaggatgactcgtttttcggctacaagacacatattgccatgagcgatgagcgtataatcactgccgccacagtgacttcgggagagaagggtgatggcccacaacttgaagagctggtaaaccagagccgtgccaacggaatgacggtggaaacagtcgttggagacacagcttattcaggtaaagacaacatcatattatcgaacaatgaagagaatggttttgagctagttgcaagattaaatccagccataagcaatggattccgtaaggatgaggataaatttgatttcaataaagacgctggcatgtttgtttgcccggctggccatatggcaattaggcgcgctgtacaaggaaagaaaggacagggaacgaatcagtcaatggtctatttctttgatgtagataaatgcaagttatgttcaaggcgagagggatgctacaaagaaggcgcaaaatctaaaacatattctgttcaaataaaatcatcagagcatcagcagcatgaggcgtttgagaaatcggaagagttcaggagtaaagcaaaagtgagatataagatagaggccaagaactccgaattaaaaaatgtattagggtatgaccgagcatggtcatacggaatagaatgtatgcgtatgcaaggggctatggttatctttgtagcaaatatcaagagaatcctcaaactcagatgaggggagagccttttcgttctctaaaaagcccttaattggccgtttttaagctttacagggcaagtaaccgctaaattcttagattcaaaagtagaaaaataagttcgccaaatccaattatatggacttggcgaacctttcattttattgcctttagagagcctttttcagtgccctcggcgagctctacaccttctttcgcctgctggcggatggagccgtgtcaccgggcacaccgaaagctgaaaaagacgaaaccctgcgctggcccgttgccttgatacagagggaagagcatgacggtacgcgccgttactatatcgaagagcaggaagtgcgcattgtcagcggaactaccgggaaggacggttcgtttgttccgggcgagaaggaggaactgcgtttcccccgcgaagactttggtgatgcggcagagttggttctgcatctgttgaagaacgtttcgggcgaggaagtggaagtgactgaaggcttggaagctttcctggatgctgtcaatatcttcgacctggaagcaaagacggaggaccgtaccgacttctccgttgccttctggcatcccgaagcacctctgacgggcttcaatgtccgttgtcgtctcgccccgatgaatccgttgctggacggaggacgtacggcaaatctgaagctggagcaaagcggtgtcaagtttgccgtgcccacggtgaacaaggtgaatgccctgccggaatctcctacggaagtggcagaacgcatgatgatgattgagcgactgggtggcgtgctgaagtatgccgacgttgccgaccgcgtgttccgttgcaacttgctgatgatagacctccacttccctcgcatgcttgccgagatggtgcgcttgatgcacttggacggtatcacccgcatcagcgaattgacggagcgcatcaaggagatgaatccgttgaagataaaggacgagttgataaacaagcaccgcttctacgagttcaagatgaagcagttcttgctggcgcttgccctcggcatgcgtcctgccaaaatttataacggtacggactctgccgtcgaaggtatcttcctgacggacggcaacgggcagatactctgctaccacaaatcccgtccgcaagtctttgcagacttcctttatcagaacacgcgtttggagaaaggtgccgtagagaaagataaatacggcttcttggagcgcgagaacggcgtctggtacttcaagctgaatgtaaagattgggctggtgaaacggtgaaacagccccactgaacacgtactgatgtgcattatcaactatcaattctcaaataaataaatgaacgagacattacaaaccatcaaggcacgccgcagcgtccgtgcctatacggaacagcaagtttccgcagaagatttgaaccttatccttgaggcggctacctatgctcccagtggtatgcatttggagacgtggcactttaccgccatccagaataaggaggtgctggaagagctgaacgataaaatcaaaggtgtctttgccaagaatgacgacctccatacacgggagcgtggacacagccagacttattgttgctactatcatgcccccacgttggtcattgtctccaatgagccggacaagtggtgggccggtatggattgtgcctgcgccttggagaacattttccttgcagccaagtccctcggcatcggttcctgctggattaaccagttggggcagacctgcgacgaccccgatgtccgcgctttcttgacaaagctgggtgtacccgagagccataaggtatatggctgcgcagccctgggatatgctcccgccgatgctccggtgaaggagaaaaaggtgaaggaaggtacggtgaccatcatccgctaaacagagatacccgcaggagaggtggcggttaggtaattaatcatacatgaagcaaaataacgtataattccgtcactctccgttgggcttcctcttcatagaggaaatgggttatcgctgcatattaatgatgccgctgtccgtatcactgttgttcagccccttgttgcctgccttgtgcttgcgtccgaactcgaatgtatagcccatgcgcagtacgaccatctgtcccgtctccctgacgaatgtttcggaacggaaaggagccacttcactgattctttcttttcccaccttatagttattggtgaaaggaaacataataccgattcctgcttgaaggttacgtcgggtgtacattgccatgaatgccgtctggttttcgttcttcttgatggtttcgccgaagaaattgttctgcactttccggaactgcccgagcagcgagaagtctttatattgcacttgcgccatcacgctgtaatagaattcatcgtacatatggctatagttcaggccttccgaccaactgcgcgtatatcctcccgaagcataaagcgtcaggaaatccttcagcccgaacagcgtagcgccgttaatgccgaccatcagttccgcattcaggctttggaacgaccgctggttttcatctttcagtatcagtttgccgtcctccacgaagatgctttccatgatgggattgtcataatactggtggcgcacactcagattggcgttgaactgtttcttcgaatagctgtaagacaaggagttcgtgaactgttgatacgttttcagcaacgggttgccgcggactatctgtatcgtatccatcgcctgctccacatccgtcagcgaaccgagtgacggtatggcaggactgatgttgaatcggtagcgcaggaatcccgccttcttcagattatagctcaaccgcacggtgggcgtgaaggtatagtaagcatggtcttcctcactctccttgaaccaggcacgtgtcatgcctacgctgcccgcatagctgaagtcctttaccttgccttgcacctcgaagaaagcggatgtctgcgactggtccatcttcgaagtggtgggatgggaacctttatactcattctccgtccgcatctgatagtggcgggcaccgccgctcagcttcacctccttgaagttcttttcataaatggcttcgccgatgacggagcgtttgtcgccgtccactaatgtctggatgtctgccagcggtgcgttctcgtccttgtactccttgtatttccggttgttcttggtatggatgagcgttcccgtcacattcatctggatgctctgctgatggggcagggtatgctggaagtaaaggtcgagtgccggagagtagctggatgtgtggttgttgacgtacgaatagatggactccgtgctgcccactgcccacatcttgttcagttcattctggtagggggcattgctgaggttgttacggaagatggcattgaatacatatttgtccgctttcgtcagattgtacgtcagattcaggttgttgatgaagctcagagagggcgactcgtcttcgatgccttccttgatgcggtcgatggtacggtcgcccagatagaaggtttcatgggattcgaggcggctgtgatacttgccgttcttgttgaagtagtcgatgccccattcggagttcttgtaattgaacttcgcgctcaggaaattctctccccatagggtgtggggcgaatcggagagttggaagttcacaacaccgcccgtttcgcggcggcgcaggataatgttgactacggcgcccagttcatcgtctccgtactgcttgccggggtcttcgatgaactccacacgcagtacgtctttggctctgacggccgctatctccttgtctgtcactttaatgccgttgatacgggtttgtacggccccaccaccgctgacgctcatgctgttgctcagattgtccacttgcagacgggcaatgccgagattgttcagcaagtcgtaggcaccgaacgagcgtttcagctggctttcggaaggcaggatgatttgccggtctacccgttgcagcacattgctggcagataccgtcacttcaccgaggctcacggcatcttcctgcaactgtacatcgcccaggtcgaggcttttattcagtttcagcagtatattttcactttggaggccgatgaaggagatggaaaggcggtaatcgcctgccatgattttagggagggcgaacttgccttgtgcatccgaggttactccggtcaccaaagtagagtctatggtccataatgacacattggcggctataactgcctcttgcgaggcgtccgtgacgcgtcctttgatggagaggctctgtgcctgcgtactgagtacggagagggcaagcaatagtaaaaaaagttggtttttcataattatttgtattagtctgttactgttggatagggatgtaaaagtcactcttcccgctaagggaagatgctgaagcttgtatatcagttgtttatactttcctcgtctgtccgatgaaagttaggaatgcatgaaggaataaatctcgtacatcagtgtcgaaactttgacaatcgtaagtccgaagaggagtccgaaggtaatccataatgcagtctttgcgtatctcttcatgaaccgtcttttttaagtttgttatatcgttctgttatttcttctatactaatgccgagcagctccatgctgtggaacatgtcggcaagctggttttcaaaaaactctttcttctgtattcgcatcactttcttcaccgcatctttggagaggtagaaccccattccccgttccgggtagatgatgccctctgcctggaggtattcataggccttcaacacggtacgcgagttcactgccagttgtgtggagagctccctcacggataccacccgctcttctgcccgccattcgcgggtgagaatcttgctgaaacagaaatctacaatctgctggtatatcggtttgttggtcttgaagtccataggctacagttgtttttctttgagcaggaagtagctcgatacccatgaaccgagcagcacactgatgggagccgcataattgcagaaagtcacgatggcttgtgtaccggccgacaacggatagttggtgttgggccatgtggcaatgttgtctatccagtatccgtccgctctggcttcgggcatgagggaggccacaaaagttacaattcctatgcagacggcaatggagccaacaaagatggtgaaacttttcagcaggacttgccgactgaaggcgaagtagccgatgaaggcggaagcatgcaggattacattggtcagtatctgggtgttgtgtatccggaacatcgtgatgtgcgttgcgaaatactgcaggaactcgctgccgcttaaggacagcagacctttgaggcaggctatcagtagaccgcagaataggggaagcagcagcaggtattttatccagatatgcaggaacttctcgaatgccgatgccggcagcagtatatcgagagtagagctgcgtttgctgaaatttgtttccagcaggcagggggcaatgaggataaaccatagtacgtagcgggagaattcggtggcagaggtatgtttgccgtaataacttccaccgcggtttatgtcgtagagaatgcacaggatgcagatgaacgatacgacggctgccgaccaaagcaggtgcctgccggtctcattccttttatattgttccagtagcaggaagcgtttcagattaaaagttgcgttcatagttctgtttgtatgatggattttcattgaaacatgctctttatcttttccggttgttgcagcaccgctttatacagcagttcgatgtccggtgtgttctcttctccgtcctcgttggggagaatggagaaatggcccgacaagtcttgttcgctgtagatgctttctgccggcaggatgtccgtacgggcaaagagaagccggttactgatttcgtccagcgaacggttcagtaatatttcgcctttgccaaggatgacgagatggtccagcagattctcgaagtcgtgcgcctgatgggtggagatgagcagcgtgctttcatcgtccatgctgcggctgatgatacgtttcaaggcttggcgggaggtgatgtccagcccgtttgtcggttcgtcgagcaggatgtatggagtatgcagggcaaaggcgtatgccagcattgccttcttctgttgtccgtaggagacggaagagagtttttgtttccggttgattttcagctcttccaggttcagcttgaattcttcctgattgaaatgtggatagaatacggaatggcgtgcagcgaagctggcgatgctttcggtaggcatctgcaactcttcgggcaggaagaagtaacgggccaacccttcggactgtctctctgccgtgtttcttccgtctatgctgcactttccgtttttgggaaagagtagtccgcagatgagatgcatcagcgtcgttttgcctacgccgttttctcccagaagtccatatataccgtttcctatttccaaagatatgttgttgaaaataagtggattggacttgtatccgtagcttgtgttctctatcgttatcataactttattagtgttgtactgatgtacaacactgcaaacgtagggtaagttatggagaaaagcaagggaaagagatacttattaacttcttttagcggttgtgcgcttgccgtttgcttacagcatcttcaccagtatgtcccatacagccaccatgtggcaggctgaaccgcctaatacaaagaaatggaaaaccgagtgcatgtaccgtgccttgcgcaaggagtagaaggcggctcccgtgatgtagcatactccttcggcaataatccagtagcaggctgtgggggagagggcgaaaagctgcttgaatactaccagtacggacagtcccatcaggatgtaacacactgtttccacgtaactgtgctcctccatcttgcggaggctgacaacagtgccgataatggcgcatagccagacgaagccgaacagtccccagccccaaccgccgtcctctctcaatgcaatgagtgtgatgggggagtaactgcctgcaatgtgccaatagatggctgcatggtcccaatgccgcaagcgccgtttccacggattatgatgtttcagggagtggtaaagtgtggaggcaagataggagccgcccatgccgaacagatagagccatacgccgcatgctgcccaaaggttctgtgcctggtagcattttatcaggaatagtgcacttacaattactcccatggcaatgccgatgccatgggagatggaattgatggtttcttcttttttactataaaatagtccgttacgctttcttttcatcagtcgaagcatccatagcatgtgggcaacagtttacggtctcccaacgtgttgtctacacgtgccacgttcacccagaacttgttttcgcgcacgctttctatcgggtaggctgccttttggcgggtatagctgtgctcccatgtgtcggctaccacttcgtattcgggatgcggggcattcaccagcacgttgtccgtcttgtcgacttcgccgttcttcacctcttgaatctcgtcccagatggtcagcatcacgtggacaaagttgtcgagttcggcaaggctttcgctctccgtcggttcaatcatcagtgtgccgtgtaccgggaaggagagggtaggggcatgatatccataatccatcaggcgcttggcgatgtcgttttcgctgatgcccgtctcttcgtgcaccttacggcattccaatatcatttcgtgtcctacgaagccggtagcaccgcggtaaacgatgccgtatgtatccttgaggcaggctgccaggtagttggcgctgaggatggctatctttgtggcccgtgtcagcccttctgttcccatcatgcggatatagccgtaagtaatggggaggatacctgcactgccgaaaggagctccggacacctggttggcggcattgccgaacaatttgtgtcccggaaggaacggaaccagatgctctgccacgcagatgggacctacgcccggtccgccgccaccgtgaggagaggcgaacgttttgtgcagattcaaatgacagacatccgcaccgataaagccgggattcgtcaagcctacttgggcattcatattggcgccgtccatatatacctgcgcaccgcaggcgtgtataatgtggcagatttccacaatttccgtttcaaagataccgtgtgtggaagggtaggtgatcattagggcggcgaggtccgccttgttttcttccgctttggcgcgcaggtcggccatatccacattgccttgtgcgtcgcaggcgcaggtcacggtggtaaagcctgcctggatggcagatgccgggttggtgccgtgtgcggatgcaggtatcagtattttattgcggtgcccttgtcctatactttccagataggcgcggatgacgcggagtcctgcatattcgcctgccgcaccggagttgggttgcaggctgacaccggcaaagccggtaattatcttcagctcttcactgaggttgcttatcagttcgcggtaaccttcggcctggtcctcgggcaccaggggatgcatgttcatgaattccggacggctgagcggcagcatctctgcggcagcgttcagcttcatggtgcacgagccgagggaaatcatggagtgtgccagtgagatgtccttgcggtcgagacgcttgatgtagcgcatcatctccgtttccgtatggtatttgttgaatacttcatgtgtcagataggtgctttggcgtttcatctccgcgctgatgctgcttgccatgggtacgtcgcttgccttttcccaatcccttccggcggcaatggcaaagatggagagcagtacgttgacggcagtgatgtccgtagtctcatcgatgctcatacctacgtccccattcttgaaataacgcaggttcacttccttgctcaaggcgatggtacgtatctgctgtgccgaaatggtgtcgggcagtgcaaagcggagcgtgtcgaaatattgtacattgacctgcttgtatcccagtctgttgatgctcttttccaagaatacggcaatgctgtggatgcgttctgcaatggtgcggatgccttccggaccgtgatatacggcatagaatcctgccattgtagccagcagtgcctgcgcggtacagatgttagaagtcgccttttcacgcttgatatgttgctcgcgggtttgcagcgccatgcggtagcacagcttgccgtatttgtctttcgaccagccgatgatgcgtcccggcatattgcgcttgtactcgtcgcgggtggcaaagtaggctgccgacggcccaccgtagaacatcggtgtaccgagccgttgtgtggttccgaagacgatgtcagccccccattctcccggaggggtgagcagggcgaggctcagaatgtcggcggcaacggccactttgcagttggctgcatgggctttttccatgaaggcgcgataatcttccacgttgccggcggcgttgggatattgcagtacgcaggcgaagatgtccggcgtgaattccatttcatggtattttcctatacgcagctcgataccttgcggaatggcgcgggtagtcattaccgccagtgtctgcgggaagacggcttcgtctacaaataccacgttagcacccgatttctgcatgtcgcgcggacgcagggcgtacatcatcgtcacggcttcggctgcggcagtcgcttcatccagcagggagcagttggcaaggggcatgccggtgaggtcgcatacggcagtctggaagttcatcagggcttccaggcgtccttgtgagacttcggtctgatagggggtataggaagtgtaccaaacggggttctcgaatacattccgttggataacggcaggagtgatggtattgtaccatcccataccgatataggttgtgtaaagtttgtttttggcagccagtcctgcaatgtgctgtccgaattcatactccgtcattgtcttgggcagagccagcggttctttcaggcggatgttggcaggaatggttttatcaatcagctcgtccaggcttttcactcctattttttggagcatcttctcctcgtctttttcgctgatgccgatgtggcggtaggccaataggtcgtttttcatggctgtaatgatttaaaagtttgctgtatatttaccggaagaacggattctccgctttttctattcctatggtagtcggtgctccgtgtccgggatagacaatcgtgtcgttgggcaggatgaacagacggctgcaaatatgctctatcagttcgtcgaagttgccgccggcaaggtcggcacggccgatgctgccttgaaacagcacatcccccgagaacatgcagtggtctgccgcgcaatagtacaccaggctgcccggcgagtgtcccggcacatggatggcttccagttccgtattgccgaaggtgatgatgtctccatcgtgcagataagtgcccaggggcacgggggcttcctgcagttggaagccgaacatgcggctttgtttcggcgcttcgtcaatccagaactcatcggcctggttggcttcggccttcagaccgaactctttcagcatgaaaggattgccgaagatatggtccagatgcagatgggtattcagcagatgtttcacattcagcccattcttgatgatgaagtttttcaaggcctgcttttcttcctcataaaaacagcccgggtcaatgacgaccgcttcattggtttcgtcccaaagcacataacagttctccgggaacatattaaattcgaatctctttattttcatattatgtatttagatttatccccctacatatactactttctttgtctcgaagaactcctcttcaaagaactccttcaagtcccacaacgtggtcttgttcttgacgggcatggtttcgtttcccaattcgccccccttgaggcaaatcagtccgttgggcaatgcattctgctgtttggaggagatgttcttgcggataatcttcagtaggtctgtcagtggcatcacggcacggctcaccacaaagtcgaacttccctttttcctcttctgcgcgggcatgacggaaggtgacgtttttcagcccgatactgttggctatttcggaggctacgcgtactttctttccgatgctgtccaccagatggaattgtacttcggggaaaaggatggccagcgggattcccggaaagcctcctcccgtgccgaggtccataatttgtgtccccggtctgaacctgattaccttggctatgcccagagagtgcagcacatggtgttcgtacaagttctctatatctttgcgtgaaatgacattaatcttagagttccagtccagatagaggtcgtagagtgcggcaaactgccgtttctgttcttccgtcaggtccgggaaatatttgagtattaaatccattgtgaattttatgttgatagacaattgattacagttcctattcgccgtctgtttttatagcgctgctcaatacaatgaatttaccgttcatcagaggggctatgtcctcataagacaacgtgattttggttgctcccattacgtatggggcaatttcatatacattataatagaaggtgattcccgttgggtccaggtagaaattctcgataggctccaggtcaccggtggtggcgtaacccatgtcctccagctcttggcgggtgctgacgttgttgtctgccatcagctgtttccaaagcaagtcggtcagcgcttccttatagtcgccttcaaagaggtcgtccaggcggatggggcttagggtctttaggtcgaggttgaggaaggtggacatatagatgccgtgtgcgccgccggtatattcgttgtaatctatacggtaggtcagtatcaaggtattgcacaactgcacatggctttcgattcctttataataggaataccaagctcctatactctgctcgtcctgtttgtcctcctcgtctttcttgtacatcggctccaggtcattgcggtagtcgccgacatatttctccgtatatttcttgacagcttcttcgggtgtcatcgccatgtacttgtcgccgaagcaggcagagaggaagaaggcgttcagactgtctttcagcctcacgtcggatgactggctggcgtaggcaacgttgaggatgaggttgcaggccggcttggctgtgtctccgaagagatgtacggtttcgtttacttgtatactgtcgaactccaacgcgtatgcgtttttgttcacggtgttaccgcaggaaaagaaaaagccgcttgccgcaagcagaaggacaagtaggctgacagtttgctttttcatattgaatttcgtttataaatcaacatatcaatcaaaaaactttatcgacaaatatagaacttattaacgaactgcacacataaaaaaggaaaaattaattccggcaaacggttaaaactttctatctttgcagcgcttatgaaggaactccgttacatactggctgtactcttttcctcccttatcattataagcggagtggggatttctgtagttcagtattgctgtgccgtatgcgagacgacacaaagttgctgcacctccggctgttccaaatgccatcatgcacatcgtggttcacaaaaaacatgcaaggataccggctgtacagccgtctactacaaggtggatttcgtgaagcatgcacacgagtctgtttcgttcgtgccattccttatactgttttgcgagcaactgccgctgtttgatcactccttgccgcaggtggcttgtactccgagagttgtttcaggagcaccgccatatgtcgtcggctcgcgtcattatctggcgctctattccacgcttctcatttagtgttgttttatacggggcaatgacctggattgcccggagggaactgtttgttttttaatcacttctttaagtataaaacagaaatgaaatatagtttgatagccattcttctgttctctttcaccgccttgcaggcgcaggtaaagggaacggtaaaggataatttgggcgacccgattgcgggtgccaacctcttctggcagggaaccacccaaggtaccaccacttcggcggacggtactttctccttgtccaaacccaatgacaagcatatgcttgtagtcagctttatcggttttgagaacgatacgatacacgtcagtaaccgcaatgagacgctcgacattgtcttgcgcgaaggggtggaactgagcgaggtgaatgtggtcagccgtaagttgggcaccatgaagctgcgcaacagtgtgatgaatgaagatatgataagtagcgccgagttgagtcgtgccgcctgctgtaacctgggagagagttttgtgaccaatccctcggtggacgtcacctactctgatgccgccaccggtgctaagcaaatcaagcttctcggcttgtccggtacgtatgtgcaaatgatgacggagaatatccccaactaccgcggctctgccgccccctacggactgggttatgtacccgggccatggatgcagagtattcaggtgagcaagggcagttcatccgtgaagaacggctatgaggccatcacgggacaaatcaatgtggaattcaagaaaccccagttgcccgaagccgattggttttccgccaacctctttgccagcagcaccaaccgttatgaagccaatgccgatgccacggtgaaactctccaaacgttggagcacctctttgctggcgcattacgagaatgagaccaaagctcacgacagcaacgacgacggctttgccgacatcccccgtgtggagcagtacaacctctggaaccgctgggcatacatgggcgaccgctacgtcttccaggcaggcatcaaagtgcttacagaagaccgcaacagcgggcaagtcagccatggcaaaacgtccctggcagacccttataagataagtataggtaccgaccgctacgaagccttcaccaagaacgcctatatatttaataaggagaagaacaccaacctggcattgattctttccggctccctgcacaagcaggatgccttgtacggacggaaaatctacgatgtggaccagcacaacgcttatgcctccttgctgttcgagacggaactgaccaagcgtcaaagcctttctgccggactgagcttcaactatgactcctacgaccagcactaccgcctggacaatgacgccgcacagcctttgacgaagaaattcaccaaagaagccgtccccggcgcctacgtgcagtacacctacaactgggacgataaactggtgctgatgggtggcatccgcggcgaccatagcagcgagtacggctatttcgtcactccgcgtttccatgtgaagtacaatcccaacgagtatgtacatttccgtctttcggcaggaaagggataccgcacgaaccatgtgctggccgagaataactacctgctggcaagcagccgccggatagacatcgccaaacgtcttgaccaggatgaggcttggaactatggcgcaagcacttccacctatattcccttgttcggcaaaaccttgaacctgaatgcggaatactattacacggatttccgcaagcaggtggtggtggatatggatacggacccgcatgccgttctgttctacaaccttcacggccgttcctattcgcaggtagtgcaggtggaggcaagctatccgttcttcccgggtttcacctttaccgcggcttaccgttggacggatgccaaaacgaattacaacggagagctgatggagaaaccccttaccagcaagtataaaggtttgctgacggcttcttatcagacacctttgggattgtggcagtttgatgtgactttgcagttgaacggtggcgggcgcatgccggctccatacgaactgacagacggcaactggtcgtgggaaaggcgctatggcggcttcgagcagttgagtgcccaggtgacgcgctatttccgtcgctggtctatatacgtcggtggcgagaacctgacaaacttcaagcagaaaaaccccatcatcgatgcttccaatccctggggaagcaactttgatgctacgatggtttggggacccatgcatggggcaaaagcctatgtaggtgtccgttttaacttgccgagaatataatattatttattaaatcaatagcgaaacaatgaaaacaagaagatttttaatgactttggcagttgtactcttctgtgcatctgccgcaatggcgaaagacatccgtacagccgtgttcaaggtagcacagatgaagtgtgagaactgtgtaaggaagataaacaataacatccgttttgagaagggactgaaggacttccacacagacctgaagacaaagacggtaaccatcacgtatgatgccgacaagaccaatgtggaaaagttgaaagaaggtttccaaaagttccattatgaagcggagtttgtcaaggaaaccaagcaggacgataagaagtaattgaacaaactgctcattccagttgttgctttattaaagcggaacaacaaccatctaaaaaataaatcgaatgagcaatataattactaaggcacatcccgtgccggatatgcacagcacgggattgcgcgtcgtcggtgcatggctttttgccatcgtactgatactgttttctacagtctttgtgcatgtaccctatacccgtgaaatacagatggtactggcaattccggtactgctgtttttcggcgctcctttttatgccggtgcctggaagggaacccggtcgggccgcaacaatatagaccgtctggtggcgcttaccacctctgtggcttttctgttcagtgtgttcaacactttcttcccggattattggctgggcatcgggctggaaccgcatgtctattatggggttgccgccgtcatcatcgccttttccctgaccggcgagtttatggaggaacgtgcccggcgaaatgtgtcggcggctatctgccggttgggaggctggcagcataacgcagcccgcgtactgccggagaagcaacgcattgacgaccgcgttgccgagctttttgtcccggtcattctcatcatttccctgctgaccttttttatatgggtgttcttcggaggcatagatgtagtgtcacacggtctgtttgccgctttgtccgtattggtggtggcttgtccgtgtgcggtagggctggccactccagtagctttggcggcgggccttaataaagctgcccgcaatcatatccttatcagggacacttccgctttagagcagatgcgcaatgtggatgtggtggtattcgacaagaccgggaccttgacagaaggacatcctacggtaataggctggctgtgggcgcaagggcaggaggagcattataaagatgtactgcttgctgccgagtctacttcggaccatcctctggcagaagcaatcgttacggccctggaaggggaggagcaggttatccctgcccacctggacggttttgaaaacattaccggaaaaggtgtcagagtggcctatcagggtgcggaatattgggtaggaagccataaactgctgaaagattatcaagccaatttgtcggatatcctggccgatatgctgacacaatatgaatcggacggaaacagtattgtctactttgggcgtgagaacgatttacttgccgttattgccatcaaggaccagttgcgggtgacttctatggaagctatccgggaactgcgtatccaggacatcgagatatgcatgcttacgggagacggtgagcgtacagcttcttccgtggccggcagtttgggtatcatgcgttttgtggccgatgccatgcccgatgacaaagaggatttcatccataagctgcagcttcagggtaaaacggtcgccatggtaggtgatggcgtgaacgatgcgcaagccttgagctgtgctgatgtaagcattgccatgggaaaggggaccgatacgttgatggacaccgccatgattactctcaggacttcagacctgctgctgttgcccaaagttttccggttgtctcgccagactgtgagcctcatgtaccggaatctgttctgggctttcatctataatacagtgggtatctttgtcgcggccggagtactctatcccgtctatgacatcctgctgagtcctgcgctggcaggtgctgccatggctctttcctgtgtatccgtggctttgagcagccttcgtctgagttccaggttctgatggctgtattctcagctgttcctatactccagcggactcatgcccatgtgcctcttgaagtattttccaaagaaagaagcactggggaagttcaaggaataggcaatctcctgaatggtcatgttggttgatttcagcttggctttcacgtctacgatgacgacgtgggcgatgatgtccaatacatttctgccggtcacttgcctcacggtggtgctgaggtgttgcagggagatgcccagtttgtcggcatagaattgcgcgcggcgttcgcgggtatagttttcgatgacgagctgcaccagttcgcggcatatttcctctttccggctcttgttccctttttgcatctgcggacggtggcaatacattctgtctatgccgctgaggagcatgctcagagtgctctgtgccattttggtgtcaggaggatagggaccggtcgtgatgcgtgcccataaggcaaaatagtccttgaaataggaggcgacggtagggttgatagccagtaccggatactccagtatgttggagaaggagcttaatgtagactggatgaggttgactccattgaggcaatgggaagaaaaccccacgaatcccaggcacactttgtccttttgttcgtaaaactgtatgatggttccgggaagcagggtgataaaatccccttgcttgatttccgtatccatcaagttgatggataccgtgatggaaccttctatgcatagtgcaaagatgcatgctttcaggcggcacgactgtttgtatatgtttagaatgtcttccgttacttcagtccatgcaatcatgtctactggcaggtcgacttgaggaaattccatacgctttgtcgtttagagttcgcacaaaggtaattcttttccgggaaaaagtaacggaagacattctgtttttaaaatgaaatgttctttttagaattcaaaaaagtactatatttgcttgcatgaaactggaaatatcagattggaacatgattccttatgccggagcatggagccggcagacggaatggtttgacgcacttgtacatgccaagcaggcaggagagtgctatgtcaatcatattgtgctctgcgagcatccccatgtctatacattggggcgtagcggaaaagaaaggaatatgctgctgggagaagaacaactgcgcaggataggggctacgctctatcatattgaccgtggcggagacattacgtatcatggtccgggacagttggtctgctatcctattctgaaccttgacgacttttctttggggttgaaggaatatgtgcatctgctggaagaggcggtaatccgtgtttgtgcttcgtttggcatcgcggccggacgtctggagaaggcaacgggcgtatggctggagggcgatactccccgtgcccgtaagatttgtgccatcggcgtgcgcagcagccattttgtcaccatgcatggattggcactgaatgtgaataccgatttacgttatttcagctatatcaatccctgcggattcatagacaagggtgtcacttctttgcagaaagagctgggacacgaggtgtcgatggaggaggtgaaggagcgtctttgcaaggagctggtaaatcttttgtcatgaactatctggcacatatattcctttccggttcgaacagaaaagtacagttgggcaattttgtaggcgatgccgtaaagggaagctcctataagaattatccgccggatatagccaagggtattcagcttcaccgcgctattgacgactataccgaccatcatccggcagtttgcgaggtggtgcataggcttcaacctgaattcggacggtattcgggggtattgctggatatttgtttcgattatttgctggcttcccgtttcgagtcgttctccggaggctccttgaggaagtatacccggaatttttatctttccctccttatcaattaccgctatcttccgctacggttcaaacgtttcatctggcattttatcctgaccgaccgtttgcggaaatacgccactctgaacggaataagagagtctttgaacatcatggtggaatatcatcatattgatatatccgtagacaaggctattcgttaccttgaagagcacgatgaggaactgtttgctgtgttccagctattttttattgaattgcagaggttttgcactgaataccggcataattataaggtatagttttaaggacgaagaagaaattcatatcgtgtcggcaaggaattaatttcctgccggcacgatatttgttttttgtatcacacgttattgatttcctgcatgacatgttattgatagcttgtgccctgtggaatcagcttcccgtactccgcttctctcttgccagtaccgagatgatgtaccctcccttgctgttcaccttgctccagttcgtcccattgaatattttccagacgtagtttcccagcctgccgtagtccgataacttcagaatcttcctgatttcctcccggtcggtgatgtagagcttttccagattcagcatgaggcattccaggttgtgcgtattcctgttgtaggcatatccgggaatgtccagctcaggattcccctgcgctcctccgctttcccccgggggagtaagagggggaagtgctttactttcttttgctttgctttctttgctttgtttggaattgcatgcattttcggggaaaatgtccgcatcctgcgtgcaattttcccgtttttgcgtacaagtcttgtccttgtccggcttgtcctcttccgtctctaccagcagatagggcaaggtggtgaggtctctttttcttcgtttggtggcttccagccataccttctgtatctcggtagaggtcagtaccccttgctccttataggttttggggtcgaaaaaagctttctccaccagaatgtccacgattccctgcatctcctgctcgttgatgtcctttcccgccttgtttgtgaacagtgtgcattgctccgcgttccatttcaggtaatatccgttttccttgtgtatcttgcacagcagcttcattaccgccgccgttcctttcagtccgaacctggcttccaccagttccactgctatctcttcgaatagatttactttgagggggaagtatagcattcccccgtacatcatggccattgtttttagtgtttaatgattagtgattaatggttaatgattagcatatggggctccattcgaggaagttctccagctggaaagttttccatgcctgcagttccacgtcccagaaggctatgttgcttgtcactcttgtaatgtcataatctcttctgaagtcagccttgtagggcagtaaggtggcttttgccagcctgaatgtcccgtcctgcttgtggtaggctatgagtgcgtgtccgtattgcatgtggtctatcaggctttctatccgtcgggccatccatgtggcgcatgtttccgtgtagttcttttccagcatgatacgtattttccataggtttctcagtgcttcgtgaagtgaagcgttctttgtcgactttctcatcttgttgtctttaaaattaataattgtattagtttggcaggaggtacgcttgtagataaaaaaagatgccgcattcgttgagaaagcggcatctataggcggtgtggcttcatccttaccaaagtggcggcaaagataagtggtttattccttaagttgtttatatttaattattgtcaataagtttcgtggtttctgcccttttttgttttattccctatatctctcctgctaccttcatttcccgccacacttcaccgaactcttgtattatagtgttttctgacagtcttttatagtctggcgttctaaagtcgaaatgtgagtatgcccattgtgccaatgccttgttgcttgtcggcttttcttctataaagtatcttgattttctccataggatgatgtctttaatgacttctttcctatattgtggcaatattcccataacctccccgcttgagggacgtcctactcctgctttaggagctgatatgccgtgctttacatccgttttaagggtgtctctttttgttttttttccttactttggagtgtctcttttgccttcattttctaatgtttttgggttaataattaaaattactgtagtttgtaaaataaatgcaaaggtatatcaagttttttgtttttgcagagtaaggatggagataaaaagctgggttttatctttatgatgggttaatgcgttgatatataaatggaaatgactttgacttggaagtgttttttaaacgttcgtttaatggacgcaaagataagactgttttttatatcctcaaaatgtttaataaaaatattttggaaaacccatcgtatctcagtttaatctacagtaattcagtatgttaagtatcttatttaatatttaaaatttccattcccttttattaactcattccctatttcatttcctgaaatttgacgttcaaaaaacgaacgtttaaaaaacgctttttgtttgtaatccgttcgtttatagtctcttaccagaaggtgatgacgaactgcaaaaaaactgttggcaagaagggcacaatgcttgctgtattttacataaggtgctcgcaaatgattggataccaggtatataccgagggttcaaagccccagaggaacactcttttgtgaacaaaacaacgaaaatggaaacggataacgaggttgaagtctggcatgccatgcgtgccacataccgcagagagcttgatgcggtgcatcttctcgagaaggagaacctcggctgttttgtccccatgcaatataaggtaagtatccgtaagggtaagaaagtccgtactttggttcccgtcatccgtaatctggtttttgtccatgcacgtccttccgacgtacaacgtgttaagtctcaaattacttatttgcaatatataaccgatacccgcagtggtcagaagataattattcccgaccatgagatgcagcgcttcatcgccgttgccggaacctataacgaccatttgctttatttccagcccgaagagttgaatctgtcgaagggaactagagtccgtattacgggtggtgactttgcaggtcaggagggtatttttctgaaagtaaagggggcacgtgaccgccgtgtggttatagagatacaaggtgtcattgctgttgccatggccaccatccatccggatcttatagaagtgatcggctgaattataattcataatttacaactcatagttcacaattcataattcaaaaaatgtcctcctcccttttcgaagaagcaattaatctccagcgtgctgcgcacgaactgatgtatttaggtatggacggtagtcctatctatagtgatgacctttcccgccgcaacggtgaggtttaccgcttgactgcggctttgtatggttccagtgttcgaggtactactacggaagaacaagcaaacgtctgtcttgctctcttgatgggttataacgcatcgttcattgaccatggcgagaagcaggatcacctccaggagatattaaaccgttgttggaatctccttgatacccttcccgcttcgctgttgaaactccgtctgcttactgcctgttatggagaagtgttcgatgagctcctggtcgacgaagcccggaagattatttcttcctgggactccgcatcgctcactgccgaacagcaggaagctgtcgaggaattccggaatgtagttgacaatccctatccgtgggaatatcttgaggactaaaacaggtgaaagttttctcgaaaggcaaaaaaagaaatggagtggagaatgcaggagacacgggaaaagttaaaggcatatagaactaaacatacaagtgatatattcatgtaatgagtgaaaaggattccacacattgtattacgaaaaatagtctccagagaaacggattatatggcatttctgccaatgaatatagtaaaataacttattatttgattaaaaatataattcaaagtgggttataccccctttagtagatgcccaatatctattgaatatccgggaagcgtggtactaactctttcattactacgcgaagtaataaatataaatcacctttggttccaccttcccggattagtttgattttttcagtgtgtgacatataagaatctaacaaacattaaattatgcgtcgagtcttatttctgattttatgtctttttattttcttcggttctgcctatgcccagcgcatgtccgacgagcaagtggttgaatatgtgaaacaagcacaggcagccggaaaatctcagaagcagatgactgccgaactgttgcgccgtggtgtgacccgcgaacaggtgctccgcatcaaggataaatatgagaactcgggtgttgctgtcccgggttctgaagctccctcacagatgcgcaagcgttcggttgctgtgggagaatcctacgaggctgccgaactggatgaccagaaagcggttgttgatgagagacttgaaagccagtccgcccctgaggctgccggcatacagattttcggtcataatctgttccagaaccgtaatctctcctttgaacctagtgtgaatctggctactccggcaaattatcggctggggcccggtgacgaggtgatcatagatatttggggagcttccgagaataccatccgccagaccatcagtcccgaggggagtatccaggtgaaagacctcggtcccgtttatctgaacggcatgactgttaaagaagccaacgcttatctgcaacgggaactgtccaagatctattccggtatcggagggggggatcccaattcacagatccgtctgactttaggcgatatacgtaccatccagatccatatcatgggtgaggtcacggtgccgggtacttatacactttcggccttttccacggttttccatgccttgtaccgtgccggtggtgtgaataatatcggtagcttgcgtgacatccgtctggttcgtaacggagagacgatagagcatttggacgtctatgagttcatcatgcagggcaagatgaatgacgatgtccgtctgcaggagggcgatgtgattatcgtgagtccctaccagtcgttggtcgagatagtaggcaaggtgaaacgtcccatgtattatgaaatgaagcctgccgagacggttgcttccttactgaagtatgcgggtggctttatgggagatgcctataagaaggctgtacgcatcatccgtaaaagtggacatgaacatcaagtatataatgtggatgagatggactattccgtattccgtttagacgacggtgacttaatgacggttgacgccgtactcgaccgttttgagaacaaggttgaggtcagtggtgccgtctatcgtccggggctttatcagttggacggtgaggtgaacacggtgaagcagctgataaagaaggctgagggactccggggagatgctttccttgcccgtgtccttctggaccgtgagcgtgaagatcttacgcacgaaatggttgccgttgatctggagggtattatgaacggtacggtttctgatataccccttcagaagaacgaccatctgtatgttcccggtatccacgacctgaaggagagcgagacggtctccatttatggtgaggtgctcaatcccggtactttcctgtactccgataacttaacgatagaggatatgattgtccaggcgggaggtcttaccgaggctgccgccactacctgtgtgagcgtgacgcgccgcatcaaggatcccaagagtactgcctacagcagcaagcttgcggagacattcacctttgacatcaaggacggtcttctggcgggtgctggtagtttctacctgcaacctttcgatgtagtccaggttcgtcgcagtcctgcctaccaagttcagcgcatggtgacggttgcgggtgaggtgcttttcagcggcagctattcgttgttgaaaaagaatgaacgtctgagtgatgtgataggtcgtgcaggcggaattactccggcggcatatataaaggggggacgtttgattcgcaagcgcaatgatgaggaacgtcggcgtgagacggatgtgcttcgcatggcacagagcggtgaaggttccgatagcattgcagtgaacaagcttgctatctccgacacttacacggtaggcgttgacatgaaaaaggctctgtcacatccgggtagtgattatgacattgtcctgcgtgagggagatatcgtgtatattcctgaatacatcaatacggtgaagatcagcggttctgtgatgtatcccaatacagtaacctgggaggaaggtgccaagttgaaacattatatcaatatggcaggtggctatggcgagaatgcgaaaaagaagaaggcatacatcatttatctgaacggtacggtagcccgtgctaagaagagtgacagtgatttaatccagccggggtgtgagattgtggttcccacgaagtctgagaggaagcgtctccaactttccgagattatgggtatgagctccatgactgcgacgattgcggcgatggtggctacgttgactaatgcttttaaataagaaacaagtggaagatataaaaagaaaggatgctgatatgaatgacggacaacagaataaacatccacaggaagaggagattgatttgcttgagcttgctttgaaggtctgggcagagcgcaggtggatattgaagtgttgtggctatgcagtgattgtggggttggtgattgctttcagtattccgaaagaatatacagctacagctacaattgctccggagttgtcggatggaaagagtgggggaggattgtcttctcttgctgccatggcaggtattaatatgaatgcttcttctagtgctgatgctatttaccctgatttatatccggatattgtgtcgtctactccttttatcacagaattgtttgatgtacatgtagagagcttgaatgcaaaaatagatactaccctttatgggtatatagatgattatcaacgttctccttggtggagtgctgttacatccgcacctttcaaagtattggggtggataatatctatttttaaagacaaggaagaaccccgtgacaatgctaaattagatcccttccatctgacgaatgaagaggcagatgttgtcagggctttaagtcaacgtatcagtgtctttgtagataaaaaaacgggattgactactttatcagttacgatgcaagatgctcgtattgctgcttgcttgacggatactgttatgagtcagttgcaaaactatgtaacggagtatcgtaccaacaaagctcgtaaatattttcaatttcagcagtctctttttgagcgtaagaagaaagagtatgaaaaggcgcaggaagaatatgcgaagtttgctgatgcaaataagaatattattctgttaagttatcgtgtcgaacaagaacgtttagagaatgatatgcgccttgcctataatgtttatacttcagttgcacagcagttgcaggtggctgaagcaaaggtacaagaaataaccccagtttatacaatagtagaacctgccacaattcccattagagcagctaaacctaacaaggcaatggtgttaataggaattgtgcttttagtgggagtaggttgtgttggctggatactcttcggaaaaaagatcttccgggatttgaaaaaatgaccttgtaatgaaactatactagttcgaagtttagctttttgtgtattacattttaatgattagaaacgaaataattcaaaaggctatctcgcaggactataatagtggggaagtgattaatcgtttgtttttttgttgtgaatacaaatactaaaattgctaaaaatactcttctgttgtactttagaatgtttctgttaatattggtacaattatatacagtgcctatcgttttaaagtcacttggtgcgtctgattatggtctttattatgtggttggaggagtagtaacaatgttttcatttattggtggttctctgtcgtcgggatcacaaagatttatagcctatgccttaggtaaagatgatgttagactcttaaaacagacatttgatacaactcttagcatatatattgtatttgcaataatttctttcgttgtattggaattagctggggtatggtttttgaattgtcaaatgaatattccgaccgataaacttacagcggctaattgggtctatcaattttcgttattggcttttgttattaatctgataattattccttatatagctactgtgatagcacatgagaggatgtcactttttgcttatcttagtattttagaatgcattttaaaattgggtgtagcaatagttctacaatttatcttggagaatcagttagttgtttatgcaattttaatattcgtagttgcaatattagttcaaggtatatattttttatattgtagattccactttgtagagtgtaggaattatagactttcatggaactctaaaataggaatggagttgcttacttattctggatggaatgttgttggctctttggctattatatctagacagcaaggtttaaatgtgctactaaacttattttttggaactattctaaatgctgcccattctattgctcaacagataaatggtgtattaacgcaatttgtaaacaatctttatatggctactcgtcctcagatcacaaaattatatgcagcaggtgattcgaaggagatgtggaatttggtatttcgtagtgctaagttggcattttacttattaatgttggtcagcatcccttccgtcattgaaatgaatgccatattgacattatggttggggagtgtccctcaatataccacagaaatctcaatattgatgattatatctatgcttatagaaacacaagtaaaccagataatagcagcttttcaagcagcgaataaaataaaaaaatatcaattatattctagcactattttgcttcttaacatccctattacctatttgttacttaaaactttagatgatattccattggtaccatactttgtttctatcttgctttcagtattgtatgcgggatcaattctttggcaggcaaaagtcgtaatacaattagatttaaatagatacattaagcaagtaattttcaagcttagtcttgtgtttggaatagcatttttttgtatatataatatttcaacgttaatggcgccttcattttatcggatagcgtgtacctattctctctccatatttcttattccactcatagtttggcttattggtctagatcattttgaaaggtctttttgtattcgattagtgcgtaataaatttcatttataataatactcatttaaaatataatttcaatgaaagcacctaaaattatagcagaaattggttgtaatcataaaggcgatatgaaaattgctaaagagatgattatgactgcagctacttattgcaaagctgatgtggttaaattccagaaaagatgtaataaggagttgttgacctctgaagaatacaatgctccacatcctcatccggaaaattcttatggtcccacttatggtgcacacagagagttcctcgaattttcattagagcaacaccgccagttgcaagagtggtgcaaagagtttggaatagagtattccacctcagtttgggatattacatcagctaaagaaatatgtacattgcatcctaatttaattaaggttccttctgcctgtaatttgaacaaaggattgttggaatacttgtgtgataacttcgaaggagaaatacatctatctttgggtatgacaacttataatgaagaggaacagatagttcaattttttgagtctaaaggacgtaataaggatcttgtaatttataattgtacttcaggttatcctgttccatttgaagacatttgtttgcttgagttgtcccgtttacgtgagctatattctagttgcgtaaaggctattggtttctccggtcatcatttaggcatagctgtagattcagctgcagtagctttgggagctgaatggatagaacgtcattatactttagaccgaacgtggaaaggaacggatcatgcagcttctttagaacccgatggagtaagaaaattggttcgtgattgtcgtgcagtagccaaggctataatgtataaagagaaggaagtgcttgatatcgaagaggtacagcggaataaactaaagaagtaccagattaaatggtagtactagatagcaaaattgttgatcatatagtctggattgactgtctctaacttgtcgctatcttcttcagtcattttttatagaagttaatccactccaaatttaatttccaacagagaaccgattccaatatcgtttggtctttgcaccagctttttgtattgtaattatttgtgtccttattgctaaattcatggagaagaaccgataactagctttatcttgtttggaaaatggtttaagaataatataaaatgaaaattattgcatttatacccgtaaggggagggagtaaatccatccctcttaaaaacataaagcccttttgtggtaaacccttagtttgctggaatattgaggccttagaaaattgtccgttggtggatgaaatcattgtggcaacggacagcgttgagattgagaatactgtattggctcaaacttatcaaaaaacagccatttatcatcgcttatccgagaatgcttgtgatacagccagtacagaaagtgtcatgcttgagtatcttagctatgctcagcttgctgaagatgatatatttatactagtgcaagctacctctccgctcactgaatctattcattttacggaagccctgaataagtatcgtaagggggattttgattccattctgacttgcgttcgtagctatcgatttttctggaatgaagatggtaccagcgtgaattacgattaccgtaatcgcccgcgccgccaaaacttttcgggtacgttaatggaaaacggtgctttctatatcaatacagtcctgaattcaaacagacaatgcaacagtgtcgaattcattgttagttaataatttatatttttcctttggggtcatgtaacccaatctttttctcggtcttgagtttaagatgttttgaacgcgcattacctgttcattggttatgtccctaaagtccgtacccttcgggaagtattgcctaatcaaaccattgctgttttcattggctcctctttcccacgagtggtatggttttgcaaagtaaacaaaaatatttagtttacgtgcaatttcttcgtgaaaactaaattcttttccattatctgccgttattgtatgtatttggtctctaaaaggttccaaggcatcgatggcagctttagttagcgggctggcatctttcccgctaagtagtcttatccatactagtccagttaccctgtcgtttatagttaatagtgctcctttgtgattcattccaatgactgtgtcaatttccaaatcaccaaaacgtactttcttgtctactatcgtaggacgcttgtctatgtccacgcggtttttgataaaaccacgtccattagtcaatgcacctctcttcttatgacttcttccccgtcttcttaaatgcttgtataacaacttatctccatgctttttatcttcccaaatatactggtagattgtctcatgagaaactgtttccaagccctttgttcgcataaacccagtcacttgttctggactgaaatctttctttatgagtatatctacttgaattttcaagtcgtccgtaaacttcacgaagtgctttcgtgaacgcattctggacatatacttagcctgagcgagatccggtttgtaaatgccattacgtttatcactattacgacgtaattcacgacttatagtgctacgatgaactcctacaagattggcaatctcggttcttgactttccgctttgcagataagcggaaatgttatacctttgttcttcggttagctgtttcatattgcaactgaatgttggggaactggaagatgcaaagaaacaacttttccacaggggaacaaaagggaaagaaatcttctttctctgttcctctgaaaaattattcttttcgtatcttctcattgtcatcattctcactcctgttgcattatccgcttgaacttaggagttaagaatattattgagaatggtaatcgtttgagcggacatataggtatctatgaaatgccggaatatactgctaccgagattgacgaaccggatgactgggctgtgttggaaaaattgaaccagaagtatgtgttgtgcaaacaaactaagcaaagcttgattaaactctttatcactgatgtcgatggcactttaactgatggtggaatgtattattctgaaacgggtgatgaaattaagaagtttaatactcgtgatggaatggggttacaactgctgcgtgaagcaggtataaaaacagctataatcactagtgaaaacactcaaatagtgagcaatcgagctaagaaactgaagattgattacttgatacaaggcaaacgagagggtggaaaactagaagccgcaaaagaaatttgccaacaagagggaatttctctttctgaagtcgcttatattggtgatgatgtgaattgctatgatttgttagaagcaacaggtgtgaaagcatgcccacaagacgcttgcaataagataaagcaaattgctgatattcatattttgtctaaaaaaggtggcgaaggatgtgtaagagaatttgtggacactttattagcctattaatgtcaagtacaatccaactgctgatgaacaaaaggatattggttgccctttctttacagttggggctacttttgatggtgattggcgtttatatttgtttgaatccatggtcatggcaaagtaagagtttacttgaaataatgttcatgtttgtagtgttccaatcactagtattacatactaattttcatggtacttggaaaaatatagataatctttttattgctttcttcgtattttttttgggtacaagatttcttttcgatttcttctcggataagtataatgtatgtttttttgagttttttttagctcgccaagtgtcagtcaatgttgtaaatagagctgtttttaatttaatgattgcgctctgtagctacaacattggggggttactttggaggtattttagcaagtcgtataggaaagatgaatttattccttcgcttgaatcagaatggttaccgtctaataaggtcgtttatgccttgttgggagtgggggtattggccaaactttactattcgtatcaagtttttatggcgatgttgacttatggttatctatctttctttactgatgggttttccataaaccgtaatttggcttttatgtttgcggaaactttttatgaaattgccatttttattattatatgccgtaaggaaaagatgcgaaagtgggaagctttcttcatattcttgtatatagggctatctatggctactgggcaacgaggtttgggtatgctttcagtagtcttctttatattttatttagtcaaggcaggtaaaatgaaaatcaacattatgaaattgttcttaatagtggttttcctttttcttttctcggtagtggttgggaacatccgaagtgataaagagttggattttacaagtgtttttagctattttttcgatttcttttacggtcaggctatttccattacagtgctagtttctactatcgactatatttctcagattgatttttcattttgggatttatttggacacattcgttatttgctggaatattattgggaaaagataactttacaaacgcctgtgcctattgatgctttaactcttcaggcagaagaatataagtggtatggacagtatatttcatgtctcactaatccggatatgtattatagagggttaggtactggtagttcctatgtaggtcagctttttgctgtaggtaaagagggcgctcagtttttgggagggatgtttgtaggttatttagctggagtattttatcactatctatcttcgcctaatttcttgaaacgcttctatgcatttcatgcactaacggttttcatttttattcctcgtgctaatttgtttgagtttgttagtatgcagtgggcgccttacgttacatcgttgtttatttacttttttattttaatgggtaaacgtaaaaaatcagtaactataaattgttgttatgtatagagtatctgttatcattcctatatataaagttgagaaatatatagaacggtgtgcaatttctcttttggaacaaacattgcccgatatagagattatatttgtggatgactgttctccagatgattctatgcgattgttagacagtgtgttactaaaatattccgatttgtttcctaatattaaaattattcatcatgaggtaaattcgggattagctgtcgccagaatcactggtatcaaagcggcagagggcgagtatattgcattttgtgattcggatgattgggtggataaagaaatgtatgcttacttgtattctggagcccaagcgagtggtgcagatatggtatatagtaactatgtagtagagtttgagaagaagcatcttatctcaaaccttccgaggatagaagatattgtacaatatcgtatgtcgctcctatatggtactttaccaagtttctcttgtatacgcttatataagaggagtatctttatggataatctgcacctactatataagcctggagtaaatatgtgggaggatgcacggatgaatatactgttggctccctatttaaagcgtgtggcatatgttccctttgccggttatcattataatcagtgtaatgaaaatgcctatacgcatttgtggagcgaaaaatcgcgtagtaatgtagcggaagtagtagctgatgttactaatggtattggttctcaagcagattatacacttccactttgtttttttagattgaatgccctctattcaattttttctcattccacccttttgcagattaaacaatttgaatgggaatatatgcaagacatcccctacatttggaaacatccgaatatgtcttttgccaataaattgtacttgtttctattaggtcatcgctttttctacatagctactgcttggatgaaactgaaacgtaacattagaaaaatgattttgaaatgaagaagaaagaaataactcatgtgtgtatggtggaaaccgtctacacgttatttttatatcttatactggtgaaagaagaggattttaatcatacctttttcttttgtagtgatgccttgccggaactagtacgttgcaagttgccgcatcatcactgcttcaaactgccaaagcgcagatggcatcgttggctttttcgcatttggctttattacacagctcctttacgctttccgtttatcaagcagagtcatatatacggtagtgataattatcttttctcttcgggaattgcgcgtagctatgacttgattttggtggaagacggtctttctaattattcccttatacaagtgaatagcctactttataagccacgacgtatcctaatgggccaaattgcagcggaaggttgtggtggggtttcccccacagttaagaagataatgcttacaggactacttccggtaccagcattgatacaagacaaaaccgaaattttttctgttataaacaaatggaacagactgtcctcttcttatcgtactcgtattttaagcctatttgattgtttagcagaagagctggaggaaatctctagttatcaagacatattgtttactcaaccaatggtggaagacgggttgattacgcttgaggatgaattgaatctctatcgtactttattagcaggttgtaatcagagtaagcttttaataaaggtacatccgcgtgatacacttgactatagtaaattcttccccgaagccaaagtttggcgttctttggttcctatggaacttatttcattgctaggcatacagttccaagaggtatatactgtgttttctactgctgcattgtcactgccatataaaactcatatccattttatgggtacttcggttcactctaatcttttacgaatgaggggactgatagaatattcagattcggaataaaaatctatgaattatgaaaatactgcaagtaatcacttcacttcgtattggcggagctgagaatttgatagtgggacttgccccaatcttacatgataagggacatcaagtggatgtactcgtttttgacggggtagaaagttgttttaaacaacgcttgaaggatgctggaattcaagtatatcatttgtcaataggtaagagtgtgtacaaccccatcaatctactcagattaattccttttttaaggagatacgatattgtacacacccacaatactgcaccgcaactttttgctgccataggtagtgtattatgttcagtggctcttgtgaccaccgaacataatacttccaatcgtcgtcgcgcttggaaatggtatcgtcccattgaccgatggatgtattctcgttataaagttgtaattagtatatcacataaggcaacggagctactttgtaaggaggttggggtaaaccagatttatactatacctaatggagtggacttagtatcgtttaaaacagctgtgtcatttgagattaaatctaaagatgaatttattattatgatggtagctggtttcagggagcagaaagatcaggatacattgataaaggccatgacgcttttgccagcgtgttgtaaactttggcttgtgggtgatggagaacggaggaaacagtgtgaaattttagttcacgattgtggcgtggatgacagagtattatttttaggaataaggagtgatgtgcctcaacttctcaaaactgcagatgtaactgtgatgagttcacattttgaaggtttgtctctttcaagtattgaaggcatgactgtcggtaaaccgtttgtggcaagcgatgtaaatggcttacatgaaatagtggagggggcagggattctctttgaacatggtaatgaacgtgaatttgctgatattattcagcacttaatgaatgatacagaatattacaaccggattgctcaacaatgtatggaaagggcagccagttatgatatttcagtaacagcagaaagatataacgaagtgtattctttaatctgtagtaagcgtttaaattagggttcaaaatgctatctatatctttgttggaaatcaatatctaacaattatgtatagcagcgaagatcttgagaaatttcattttcagtaccaaagagaggccattcctcatgaagtgtatcttcagtcattctgttcaaagaataacgtcccttagaacatttttcataaatggtgcaaggatacccacagaaaaatagtagaaattcaggtggacggtgttacctcgggcccaacaccagaatcagtgccgtcttctctttcaggggaaaaaccagtaaagaaggccagtccttttccccttatagggaacagacaccggaagccgtgcgaagacctagggtacttctcgtgcgtatatccgtggagctaactttgagcaatggactgcataccctctcaaaggatttggattatctgggtgtataccgtctgaatcaaaagctggaggggcttgttgagtgtgacctgcataaaccgcttctattgcctgtggggctttacggacatgtgttgtaagctcccacgtgtcttgtccgtcatccgtgaacagttgcaccgtgagccttcagaaagtttatatcgtcatgtcgaaagaccgctgtatcgtgtaagcagtcaaaaattggctcataattgaaacctctatcttcgctgcgaacaaaaaaaataggatttatgtatagcagtgaagatcttgaaagtttttactttcagtaccagaccgaggctttgcctcatggagaatctctccaatcgttttgcgttaggaacaaagttccttataacatctttcagaaatggtacaaggatactcgaaaaaaagtagttgaagtccagattgatggtgctcctgaaattggtcatgaggaaaaatccaggactagtgatcagcctcaatcggtatcacaaagcagaaatgatcacccagttcgtatttgggttgacattcgtatcagcaatggcttacatttgtcccgaaagaatttaagctaccaagatttggctcgtatggtagagaaactggagggtttatgttgagtgttaccggtctcaatcatttttattatgtccgtgattttaccgatatgcgttgtaaacacagccgtgtgttgtctatcattcgtgaacgacttcaccgtgaacccaatgatggtgatgtttttatagtcatgtctcgcaatcgaaaaatagtccgtatgttttcatttgacaatcgttcatatagtctgttcgaaaagaagtttgttgcaggttatcagttcatgaaagtggagcgaaacggggcggatactgtttatcggattgactggaaagacgtggttttgatccttgagattccggtggttaaaatattaaaaatcagataattaaatcagttatacagttgcggttttgcgattattttactacctttatgctgtaaatcaaaggtttaagtatgatcgagctgcaggatataattacaacaaaacgagagttgttgagtagggaaacctgctcacgcacccctataaattatagtgcaggtatggcagaggatcagaaagagcggtacatacaataccttgccgggcagaattaggacttcaggttgacaggtgatgccatgaagcttgttttggaagattttatggctgagatgaaggaactgaaggatcagatggcttccatgcaatcgaaacatgcttaccttgagaatcagttatcggaagagcataagcttcgcaaatcggctgaacgtaagataaagtcacttcaagaaaaacttgattatgccaatcaggaacgttttggtgatagacgtcaaaggataaagtctaaagctaaaacggttgattcagaccgtaacaaggagaaagatgattatgatggaaccgatgatacgcttcgcgcggattcggttggtcatgttcaatccccgtaggttaaagagccttccgggaaagaccgtgatttatcgaatcgtcctgacggatataaaaggatgggagtagtcggagaagcgatagagcatccttctgacttgacaaaggttcccggtcgcctcattgaaaggagaatggtacgtgtattcagtttccgtactttccttacggaagaatgttttgagacggttcattatgcagagccgggtaaaaagcccgggtggggttattcccccttctgaaggtcatccggaggtagtaaccaattttgaaggcattagggccactcctaaatttctgcaggctattgcctatgaagtttatgtgaagaatgtgactttcggtcttcttcgccaatggctgacagatatgggcatgaccgtttctaaaaacaccttgcgcaactggcttaagaaaggcaagaaatatctggatgaattggtctgtgtattgaagtccatagctttggaaaaggactcgattgtgaactgcgatgagacctggtgtaaagtgcgtaaatatgatcactataagaagtgctacatttgggttctggtcaacaaggctcagaaaacagccattttcttctatgagaatggctcgcgcggtcgtgatgtatttacagactttttgggtgatgcagaattgaagagtattatgtctgatggatacaatgcttatgtatttatcggcaatgagctgaaatcagcccggtttaaagatactgtacatcaagtttgtatgtctcatgccaaaaacaagtttgtcaaggcttccaatcagggtggtgaaccgacagccgagcgcttttccgaaattctaaaggtgttctttatgagggagcgtaaatacgatgatgccggattcacttccaaagaaaggttgcgggaaaggcaaagcttggaaacgaaggaactcctgatagagttgcgcagtttgttagatagtgaacagtcaaaggattcagaatctagaagccagtattatagagaagctctcaattatctgaaccggttctggaaagagaactttgcttacttggatgatggtgaattacctatagaccacaatctggcagagcgaactattcgaaagctgactacccaacgtaataattcacttcattatggtagtgatgccggtgctgaaatggctgtaacatatcatagtgtgattgtaacggtaaagcttcatggcagttctatctggaacttcatcggaacttttttcaaaaatatctttaacgggtgcagggattatgttaacatggttcctgacaaaatcactttggctgccagccaatgttaaattcaagactaattaattaacaaaactcggtttagggtactgaaaagtgccctttcaaagggagatgccctaaattgagtgcttacgtccgtatgggattatcttggcattttttaccatgattttaatagttgtatagatctttttaagcttgccactacaaaatatgaacttgatactgtgttaatagttgaaaaaataattaaatttaatattttttatgcgatacccattctggggtcttgtaaaaaggatatgctctaatttgagtattaactaatctatatgaattggatttggatatttagatataagtccactacaaaaagtcttccttattagaaattaacatattacagatatttctaagaggtagtaaagctgtaaaaaaggactttttcagataactcatagtaagtttgaaatcatgaatgataaattattagtgttttagtttcgtttctttcaagtttgtttaagtagagttatagatatatgttttctacagtatatattcctttctttaaaaagacctataggaaaacctctttaaggtgttttttcctagtgatacatcaaattagtcattaacgtttaatagattttataaataaaaatggcttctgcgaagcaaaaacttattcgtctcaccaccatttccggtagtcttaacgatcttcttaaaggtcagctgcgttttctttcagattattatgaggtggtaggtgtagcttctgataaaggtaccggaagactaaaagaagtgtcggaacgcgaaggtgtacgttgtattgacatacctatgcatcgggaaatttcattgctgaatgatgtaaagtcactttggaagttgattaggttatttaaaagagaaaaaccatatatcgtccatgccaatacgcctaaaggaagtctgcttgctatggtggcagcttggattgttcgtgtgccacaccgcatctatacggtgactggactgagatttgaaacggccacggggagcttccgtagactgctgattttgatggagaaaattacttgcaggtgtgctacgaaagttattcccgagggagaaggcgtgaagaaggctttaatttccaataatatcacaaaaaagcccctgaaagtgatattaaacggcaatatcaatggtattgatgtgaaattttattcacgttcgaaggaagtgatgcagggaatggatttcataaaggaggaaggaactttcaatttcgtatttgttggcaggatagtgaaagacaaaggcatcaatgagttggtgaaggctttttcaagactattggcaatttatccgaatgtccgattgcaattagtaggaggatttgaacgtgacttggatccgttagccgaggatgtggaaaaaatgatagaagaaaacagggaaattgtagcttggggattccagcgggatgttcgtctgttttttgcagcatcagatgttttagtttttcccagctatcgggagggatttccaaatgtagttcttcaagcaggtgccatggaattaccttcgattgtcacagatataaatggttgcaatgaaatcattcggaatggtgtgaatggtaagattattcctccacgtgatgtagataccttgtacgatgccatgaaatggatgtatgagcatagaatggaggtcaaggaaatggcgaaacgtgcccgtcctatgattgtggaacggtatgaacagcagatggtttggagtgcattgctagaagagtaccggtctttgtgaagctactttttgtatgaatatatgatggaatgaaaaagttgatagtttactttaaatataaaccctatgaataagaaaattgtagttttcggtgctaccggaaatttaggtgcatatatagctgtccatatgaaggagcagggatatgatgtaattgctgttggtcataggaaaaatgataataatttttttgttgatcgtggaatagcttattattctgttgacatcaaagacccgaagtcttttgatgttctctcacttgataatgtatatgcagtggctcatttcgcaagctcattgccttcacgttatgcgtttgatccaattgaattatttgaatccataaccattggtacattaaatgtgttgaattggatgcgaaaggtcaattgtacaaaaattgtgtttccacaaactccttcagatatggcaaaatatcataatcaagaaggactgattccttgtgaggctcccagacattttccacttacaggagatcatgctgtttatacaattgctaaaaatgcggctattgatttgatggagcattatcatgctgaatatggaattcgtttttttgcactccgcttttttacaatttatcagtatcatccgaatgcctaccattatgcagattataaaaagagaatgatgccttacagaatgctaatgtacagggcgagtaaaagtttgcctattgagatttggggaaattgtaagaaaaagaaagaaatggtctatatcaaggattttgtaagattagttcaggcttgcatagagtcggataagcagggaggtgtttataattgtggcaatggatggcaagtttcattggaagagcagattaaaggtattattgaaatattttcacctaaagataaaccttcggaaataatttattgcccagagaagccggatcccctgcaaaatgcctttgatatgaccaagacttttgctgattttcctgcttatcgtccggaatatgattatttggaccagttaagggattttaaaaaagaaatggaagaggaacccatggcccagctttggggtacgaaggataattatattgaatagtaatgatgtacgaaagatatattaagcgtatcattgattttgtaatagtgttttgtgtattattggtaatctggccttttttgctcgtaataattgttttactacttgtttttaatgagggggcaggtgctttttttactcaagaacgtcctggctataagggtaagatattcaaaattatcaaatttaaaactatgaatgaacgcagaggagcagatggtaatttattgcccgatgttcagcgtattacaaaatttggtagaatagtcagaaaactgagtcttgacgagttacctcagttatttaacgtcttgaaaggtgatatggctattataggtcctcgtccattactcacacaatatttatctctttatagtaaagaacagcttcgaaggcatgatgtgcgtcctggaattacaggatgggcacaatgtaatggtcgtaataatatcagttggacaaagaaatttgaattggatgtttggtatgtcgatcatctttcatttaagctggattgtaggattgttttaataacaatcatgaaagttttaaagcgtgctgatattgataatgaaactataagtgagaaacactatacaacccctttgtttgatggaacgaattaaatgctgtgaagatttaataactccttgttttattcttgataaagaagagttagtcaaaagtatttgtggttacaagactgccttgaacaagaattttggaagatgggtaattggttattctgtaaagactaattctacgccttattgtttgaagttagctggcgaaaatggcgcttatgctgaagtagtttcttatgatgaatatgagttagttaagttatgtggctttgatcaaaggcatattatctacaatggtcctatgaagtcaaaagaaacgtttcttgatgcagtgatgaatggggcgattgtaaatattgaaacgaaaagggaattattatggcttcaggaacttccacaggataggatcttcagagtgggaatccgtttgaatattaatatcagtcgtatttctccagaggatgctgaaggggataatgataatagccgttttggtttctcggatgatacaatggaatttgctgatgctattggcttgataaagtctttatccaatgtggtgcttgacggattacatatccataggacagctcatagtcgtagtattcgtttttataaaaaatccattggttatgcttgtgaagtaattaaaaagtatggtttacacttggactacatagatgtaggaggcggctattttggcattttttccaacaagcctacttatcagcaatatagtgatagtttttatgaagtactgagccaacacggattggaacgactttgtattatagtagaaccagggaatgcattggtagcctcctgctatgactttcttagtgaggtaattgatgtgaaacatgtggagggtgaatgttggttcattacgacagatggttcacgcaatgacattgatccatttttcaagaaatcatcttattgggaaaaagagctttatcgtacggaaacatcggtggtgaaaagacagattatatcaggatgtacctgtctggaatatgatcgattgtttacacttacagataaaccgttactcagtgttggtgatagaatcctttataaaaatgtgggcgcttataccatgtgtctcaccccgatgttcatcagatatgtccctaatatttatgtcagggaaattgatggttattcactgataagggaaaagtggactgccgaagaatatattcaaaaatctaaaatttaaacagatggataacattttattttgtagtgtggggcgcagagccactctactgaaggattttcgtttatcaatgaatagctgtggcaagattgtggcggttgaccttagtcctgtagctccggctctcttttatgcggatgaggcttatttagttcctcgtattgatgctccggattactatgacaaagttcttgaaatctgtgagaaaagtgacataaaggccattactactttgattgatcctgaaatagagcttctggcaaggcatagggaggatttgcttgcaaaaggtattttaccgctatgtcctgctgattggactgcccgtctgtgcttcgataaatatgagatgtttaagtatctccatgaaaaaggtgtacgtacagtgcttacgtataattcactcgagggattgaaagaaggtttgaacaagggtgagattttctttcctgtatttatgaagcctatctctggaagtggtagtataggtattggtagggtgaataattgggaagaggcagaggctaagtttaacgatggcaagtttacttatattattcaagaattgatgacgggtggtgattgtgatgctgacgtttatgtggattgtatcagtcataaacctgtagctgcttttagcaagaagaagatagagagccggataggtggcgcaagtaagaccatttctttcaaagattcaaaactttttgattttatagaggaagtttgttctgtactcgagctaaacggtccttgcgatatggatttctttattaagaatggtgagtattatttgtcagaaatcaatcctcgttttggtggtgcttacctgcacgcttatggagcaggtgtagattttatcaaattgattctgaataatattcatggagtagagaacaaatctgtcataggtcaatatgatgaagacattattatgatgatgtatgacgatgtagtaattactcgcaaagacgaactgatatcggatgatttccctttgatttaattgccaaaataatcatgtttgaaagaaaaaacatttatctctgccttgcctatatgagcgaggagggtattgaacagaaatatgtaaaagaagccttcgatacgaactgggtggttcctctcggtcctaacgtgaatgcttttgaagaggatttgaaacgttttgtaggcgaaggtaaggaagtggtggcactttcggccggtacggcggcagtacatttggctctgttggcttgcggagtgggacagggtgacgaagtgattgtacaaagcttcacattctgtgcgtcttcgcatccggtcacttatctgggggctgttccggtatttgtggattctgagaaagaaacttggaacatgtctccggaactgttggaagaagccatcaaggaccgcattgccaagactggaaaaaagccaaaagctattgttcctgtggcattgtacggcatgccctatgactgtacacgtatcatggagatagccgataggtatgctattccagtggtggaagatgctgccgaaggttttggctcccgttttaagggacaggtactggggacgttcggcaagttcggggtgctgagctttaacggtaacaagatgattactaccagtggcggtggtgcgttgatttgtaaagatgccgaaagcaagaatcaaatcatgtggtatgccacgcaggctcgtgaggcttatccttattaccagcatgaggcgatagggtataactatcgcatgagtaatatatgtgcaggtattggtcgtggtcaaatgaccgttgccgataagcatattgcacatcaccgacatgtgcaggctctctataaggaactgcttaaggatgtggagggggtattgctgcatgaagctccttcggctgattatgactctaatttctggctttgtacaatcactctggattcttcacttcgcatcaaagggcaggaaaatgcttataaggatgttgtcaggactgccgtaggtggtgctgcaggtgtgattcatgccgtagattgtgctacaacagattgccagcccaacgagaatgtggaggctttgcgtgcttttatgcttggcaaaaaaatagaggcacgtccggtttggaaaccgatgcacaagcagccggtctataaggatgctccggcttatatcaatggggtatccgaagctatttttaaaatcggtatgtgccttcctgccgggccgtgggtgactgatgaagatgtatattatatcgtggagtgtataaaagaggccatagtaaaataatagatgaaaatacagcttttttaactacggccttgacaacgctgtcggttgccaatacgtttgtcaatgcggatttcatctataccgttgtctgttccgttctagtcttctgcttcttcaatttctgcaagcgtgccaaatattcaccgcctgatgcttcatgagaatatcggactaccgcatcgcaaacatcttatcagattatggcgaatgagctgaagattccccatgtcatagtatctttgacctatatggcagtacaggcaatcatcatcgtaggatatcttgattaagttggcttgcctaatctgtcagcttgtaaatcaatactttatgaacttatctcagaaaacagcttcagcgaggctgttttctttgtttacaagcaaatatatcctcacctttgcattgttgatcaacaaaacgagattaaaaaccatgttgaattaaaaatgtaaaaaggagaaagaaactatgcctttattttattatgcaagacagtcgtctctggcgacaaaagagggtgccaaactttggcatctgagtttgaagaaagtgggaagagccgtggatgcacaacagctggctgaggtgattgccgagaagtcttccctgactccgggtgacgtacataatgtaattcgtaacctgatgacggtaatgaggagccagttgctgaacagccgtacggtgcgtctggatggcctgggcacattcactatgaaggcccgtacgcgaggtaagggagtggtcaaatctgaagacgtgaatcccaatcaggtgactgctttgcgctgccagtttactccggaatacacgcgcccggctgccatcggcactacgcgtgccatgctccagggtgtggagtttgagaaatggatgggagtggttacggacggtaaggatgatgccggtgatggtggtaattccggtggcggttccgacggtgaccagggagagaacccattaggataagatgtatttactaattttgaaagattaagactatgaaaaagaacgtttgggacaagattttgaaggtagtgatagctgttgcttccgccatattgggagctttaggcgccaatgcaatgaatgtataaattgtagatttatatagaatattaggagaaaggcggtgaaggaaaagcacttcatcgcctttttgttattttcttcatttataattccctgccaaccaaaaaatcttattacctttgcaagtcacttttggaaacaataaaaatataatgatatgaatatctcttataattggttgaaagagtatgtcgatttcgatttgacaccggatgaagttgctgcggcactgacctccatcggactggaaacgggaagtgtggaagaggtgcaaaccattaaaggcggactggaaggactggtcatcggcgaagtgttgacatgcgaagctcatcctaactcagaccatatgcacgtcactacggtgaacctgggacaaggtgaacccgtgcagattgtatgcggcgctccgaatgtagctgccggacagaaagtggtagtagccacgttgggtacaaaactgtatgacggtgacgaatgctttaccatcaagaaatcaaaacttcgtggcgtggaatctgtcggcatgatttgtgctgaagatgaaatcggtataggtacggaccatgcaggcatcatcgtactgccggagacagctgttccgggtacgcttgccaaggattattataacatcaagagcgattacgtgctggaagtggacatcactcccaaccgtgccgatggttgctcacattatggggtggcacgcgacttgtatgcctacttgatacagaacggtaagcaggctaccttgaagaaaccttcggtagacgcttttgcggtagaaaatcatgacttggatattaaagtaactgtagagaacagcgaagcatgtccccgatatgccggtgttacggtgaaaggggttactgtgaaagaaagccccgaatggttgcagaacaagttgcgtattattggcctgcgtcctatcaataatgtggtggatattaccaactatatcgtccatgctttcggccagccgctgcactgcttcgatgcggataagattaaaggcggtgaggtgattgtaaagaccatgccggaaggtactccgtttgtaactcttgatggcgtggagcgtaaattgaacgaacgcgacctgatgatttgcaataaggaagaggcgatgtgtattgccggtgtgttcggcggtctggattccggttctacggaaaccaccaaggatgtgttccttgaaagtgcttacttccatcccacatgggtgcgcaagacagcccgtcgccatgcattgaacacagacgcttctttccgttttgaaagaggtattgacccgaatgccactatttactgcctgaagctggctgctttgatggtaaaggaacttgccggaggtaccatttcttctgaaataaaagatgtgtgcgccgctcctgccaaggatttccgtgtggaacttgcctatgagaaagtgaactcactgattggcaaagttattccggtggataccatcaagagcatcgtgacaagtctggaaatgaagattgtagacgagacagccgaagggcttacactggatgttcctccttaccgtgtggacgtgcagcgcgattgcgatgtaatagaggatatcctgcgtatctacggatataataatgtggagattccgactaccttgaagtcttgtctgactaccaagggtgaatatgataaatccaacaaactgcagaacctggttgccgagcagctggtgggctgtggtttcaatgagattctgaacaactcgttgacccgtgccgcttactatgacaacctggagtcttatccgtcaaagaatttggtaatgttgctgaatccgttgagtgcagacttgaatgccatgcgtcagacactgcttttcggtggattggaaagcatctcgcacaacgccaaccgtaagaatgcagacctgaaattctttgaattcggtaattgttatcacttcaacgaggaaaagaagaatccggagaaagtgcttgccgcttattccgaagactatcatcttggtttgtgggtgactggcaagagggtgaccaactcatgggctcatccggatgagaacagctcggtatatgagctgaaggcatacgttgagaatgtctttgccagattggggctgcacatgcatgatttggttgtcggcaatctgactgatgacatctatgctgccggtttatccgtacagacaagggggggaaagcggttggctactttcggtattgtaacaaagaagctgctgaaggcattcgatattgacaacgaggtttactatgccgatttcaactggaaagaattgctgaaggccatccgcaatgtgaaggtgagctatacggaaatctccaagttccctgccgtgaaacgcgacttggcgttactgctcgacaagaaagtgcaatttgcggaaatcgagaagattgcctacgagacggagaaaaagctgctgaaggaggtttctctcttcgacgtttacgagggtaagaatctggaagccggtaagaagagttacgcggtgagcttcctgctgcaggatgagaatgccacgttgaacgataagcagattgacaagattatgtccaaactagtgaagaacctggaggacaagttgaatgccaagctgcgttgattcattattcagaatttataattcataatttaaaatacagttccaatgggaagagcgtttgaatatagaaaagctgccaaattgaaaagatggggtcacatggcaaagacctttacaagactgggtaaacaaattgctattgcggtgaaggccggtggtccggagccggaaaacaacccgacactgcgttcggtaatcgctacttgtaagcgtgaaaacatgccgaaggataatattgaacgtgctatcaagaatgcgatgggtaaggaccagagcgactataaggggatgacttatgaaggatacggtcctcacggtgtagctgtttttgtggatacgctgactgataatactacccgtacagtagccgatgtgcgttccgtgttcaacaagttcggcggtaacttgggaacaatgggttcactggctttcttgtttgatcacaagtgcgtgttcactttcaagaagaaagacggtatcgatatggaggaactcattcttgacttgatagactatgacgtagaggaagactacgaagaggatgaagaagaaggtactatcactatttatggtgatccgaaaagctatgcagctatccagaaacatttggaagagtgcggttttgaagatgtcggcggtgagtttacctatatcccgaacgatatgaaggatgtgactcccgagcaacgcgaaaccatcgacaagatgatagagcgtctcgaagagtttgatgatgtacagacggtttatactaacatgaaaccggaagaaggcggagaataatgacatatacatacaagacgcaaggtacgtgtagcagtaacatcgaactgaatgtggaagatggtattgtgaaagaggtggcattttggggtggatgtaatggaaacctgcaaggactttcacgtttggtgaaaggcatgccggtagatgcggtgattgctcgtttggaaggaattcgctgcggaagacgttccacttcctgccccgaccaattgtgcaaggcattgcacgagatggggtattgagcctactgcttgaaagaatggatgagagcccctgacattgaaagatgccaggggctttttttgaacctaacatggaggtatttgttattatttgagtatttttacgctcttaattgaacagacacaatgaagaatatttttaaagacttgaaacggagagaccacaaacgctatctgggcggtctggacgtttttaaatatataggtcccggactgctggtgactgtgggctttattgacccggggaactgggcatctaattttgcggcagggtctgaatttggctattcattgctgtgggtcgtgactttatccactatcatgctgattgtattgcagcataatgtggcgcatcttggcattgtaaccggcttgtgcttgtccgaagccgctaccaaatatactccttcctgggtgtcgcgtcccatattgggtacagcagtgctggcttccatctcgacttcgctggcagagatattgggaggtgccatcgctttgcagatgctgtttgacattcccatcatatggggctctatcttgactaccgtatttgtagtcgtcatgcttttcactaattcctacaagaagatagaacgttccatcattgcttttgtttcggtcatcgggctctcctttatctatgagctgtttctggtgaagatagattggccgctggctgcacaagggtgggtgacaccttcgtttccgcatgggagtatgctgattatcatgagtgtactcggtgcggtggtgatgccgcataatctgtttctgcattcggaagtgatacagagccatgaatataataagaaagatgatgcgtccatccgtaaggtgttgaaatatgaattgttcgacacgctgttctctatgattgtgggatgggccatcaacagtgccatgatactgctggcagcggcaactttctttaaaagcggtattcaggtggaagagttgcagcaggccaaatccttgctggagccgttgctggggaacagtgctgccgtggtttttgcattggcattactgatggcgggtatatcttctacgataaccagcggtatggcggcaggttctatctttgccggtattttcggagaatcctatcatatcaaagatagtcactcgcaggtgggtgtgattctgtcgctgggcattgcactgctgctgattttctttatcggagacccgttcaaaggactgctgatttcacagatgatactgagcatccagctgccgttcacggttttcctgcaagtaggattgacttcttcgcgcaaagtgatggggcagtatgtaaacagcaaatggagtacatttgtactttatgtcattgctgcggtggtcactgtgctgaatatcatgctgctggtatccgagttgacatcttgaataattcatttttaagaaatcaaataagtagtatgaagattattacatataacgtaaatgggctgagggctgccgtgacaaaaggttttcccgagtggctggcacaagagcagccggatgtgctttgtttgcaggaaacaaagctgcaaccggaacagtatccggcagaggcgctggatgctttggggtataagcattacctatattctgcacagaagaaggggtatagcggagtcgctattctgagcaagcaagaaccggaccatgtggaatatggtatgggtattgaagaatacgataacgaagggcgctttatccgtgccgacttcggcgatgtgtccgttgtgagtgtttatcatccttccggtaccagcggtgatgaacgccaggcctttaagatggtctggttggagaaattccaggaatatgtattggagctggaacgtacgcgtcctaaactcattctttgcggcgattataatatctgccatgaggcaatagacattcacgaccctatcaggaatgccaccaacagtggcttcctgcctgaagagcgggagtggatgacgcgctttctcaatgcgggattcatagattccttccgttggcttcatcccgacaagcaggaatatacgtggtggagctatcgctttaattcacgtgccaagaacaaagggtggcgcattgattattgcatggtgagtgaaccggtgcgtccgatgttgaaggaggcgagaatattgggtgacgttgttcattcggaccattgtccgatgttgttggaaattacagaataatgatgatggaaacaaaagacagaatcgaaaaagctgtggagcttttcaagagtggctataactgttcgcaatcggtagtgggagcttttgcagatatgtatggttttacagaagagcaggctttccggatgtccgcctcttttggtggtggcataggtcgtatgaggcagacatgcggtgctgcatgcggcatgttcctattggccggattggaaaaaggagctgtggaaggcaaggaccgtgaaggtaaggcggcaaactatgcgttggtgcaggagctggctgctgaattcaagaaacgaaatggctctttgatatgtgctgaattgttggggttgagaaaaccggaaggttcgtccgttccggaagcccgtaccgagcagtattatgctaaacgcccgtgtgccaggatggtagaggtagctgcccaaatttggaccgaatacctggaaaaaacgtcctcaaagtaagaaaaaagaacttttttaccccttagtaagaaaaaaagtgcctaataacgtgttgtataacataaatatacctatctttgcagcgatataaaaacaccgacatctctatctttggagatgaggataacgtttaactaaaagcaaatagaaatgttaaaagaaaaagctggtaatgttgcaggacagatttggactgcactgaatggcacagatggcttgactcacaagcaaatcaagaaagcaactaaactgatcgacaaggacttcttcctgggattgggctggttgttaagagaagacaaggtctctacttctgaagtggaaggcgaattgtttgtaaagctgaactaagcgaggaattgattggaatgttataaaaagatgcgttggtacatgaatatgttatcaacgcattttttttatttgctctgttttcactatctttgcgcacccaattaatagatagttattgacaatgaagaatatacgaaatttttgcattattgcccatatcgaccacggtaaatcaactttggcagaccgtctgctggaatttaccaatactatacaagtaactaacggacagatgctggatgacatggaccttgagaaggaaagaggtatcaccatcaagagccatgccatacaaatggagtatacatataaaggcgaaaagtatattctgaacttgatagacactccgggacacgttgacttctcgtacgaggtgtcacgttccatcgccgcttgtgaaggagccttgcttattgtagatgcttcgcaaggagtgcaggcgcagaccatttcaaacctctatatggcgattgagcatgatttggagattattcccgtcatcaacaaatgtgacatggcaagcgccatgcccgaggaagtggaggatgagatcgtcgaactgttgggttgcaagcgtgatgagattatccgtgcttccggcaaaacaggcatgggagtggaagagattctggctgcggtcattgagcgtatccctcatccggagggtgacgaggaagctccgttgcaggcgttgattttcgattctgtcttcaattctttccgtggtatcattgcatatttcaagatagtgaacggtgtgattcgtaaaggggataaagtgaaattcttcaatacaggcaaggaatatgatgcggatgaaatcggagtgctcaaaatggaaatgatgccacgtccggagttgcgtacgggggatgtgggctatatcatctcgggtatcaaaacctctaaggaagtgaaagtaggcgatacgattacgcatattgcccgtccttgcgaagaggccatcgccggttttgaggaggtgaagccgatggtttttgccggtgtgtaccccatcgaggcagaagatttcgaggacttgcgttcttctttggagaagttgcagttgaatgatgcttcgctgactttccagcctgagtcttcattagctttgggctttggtttccgttgcggtttccttgggctgctccatatggagattgtgcaggaacgccttgaccgtgaatttgacatgaacgttatcaccaccgtgcccaacgtttcctacaatatctatgacaagcagggaaatatgactgaagtgcataaccccggcagcatgcccgaccctaccatgatagaccgtattgaggagccctatatccgtgcctcggtgattaccgccactgattacatcggccctatcatgactctttgtctgggcaagcgtggcgagctggtgaagcaggaatatatttcaggtaaccgtgtagaaatatactatgacatgcctcttggcgaaatagttatcgatttctatgataaattgaagagtatctctaagggatatgcctcttttgactatcatcccaacggttttcgtccttccaaactggtgaagctggatattttgctgaacggtgagccggtggatgctctttctaccttgacacactttgacaatgcctacgaattgggacgccggatgtgcgagaagttgaaagacctgattccgagacagcagttcgatatcgccattcaggctgctatcggtgccaagattatttcccgggaaacgattaaggctgtgcgtaaggacgtaacggccaaatgttatggaggtgacgtgagccgtaaacgaaaattgcttgagaaacagaagagaggtaagaagcgtatgaaacagattggtaatgtggaagtacctcagaaagcgttccttgcagtcttgaagctggattgatgtcgaaaggatgaaatcttaaatcaaatatacttctttatgattattttgcgtactgtgaaaaacttctcgtcgctgaatatagcggcgagcatcttgctgtttttgatggctattttggcggccgttattgctaattcgccgatggctccgctgtatcagggctttcttttgcaggaactgcatctgcgtatcggagacttcaacttgttctcccatggcggtcatccgttgaaaatgattgagtttataaacgactgcctgatgactgttttctttctggctgtggggttggagataaagcgggaactgctggtgggtgaactttcttcctttcgtaaagcctctttaccttttgtggcggcgtgtggcggtatgctggtgccggtcattgtctattcacttctggtcgttcagggcactccggaaacgcgcggcatggctataccgatggctacggatattgctttttcattgggggtactcagtctgctgggtaagcgggtgcctctgagtctgaaaatttttctgacggcatttgcagtagttgatgatattggcggtattttggttattgctattttctatagctccgaagtggcttacggatacctaattgtagccgctgtcctttatttcttcctttactatatggggaaattcggtatgacacagaagatatttttcctacttatcgggctgattatttggtatttgttccttcagtcgggcattcatagcactatttccggagtgatactggcttttgtgataccggctcgtccccgtttggatgccgggaaatacattaagcgtatccgcgatatcatcggtgattttccggtttctaaatcggataatattatattgaccaatgagcagattgccactctaaaacaagtagaacgcgcttctgattatgtgattagtcctttgcaatccttggaagacaatttgcatggtacggtaaactttgtgatactgccgctttttgcttttgccaatgctggtgtggtgttcagtggaggcggtggcgttgttggagctgttagtatagcggtggctgcaggattgcttcttggtaagtttatcggtatttttctgtttacctggctggcggtcaagagtggtttgtcctcgatgcctccgggaatgaattggagaagtgttgccggagtatccttgttgggggggattggttttacggtatctttatttattgccaacctttcttttgcaggagaatatccggatctgctgaaccaggcgaagtttggtgtattgctgggaacgattgttgccggtatgttgggatatatggtactgaatgcggtgttgccgaaggttaataacaaatagatctctactttggatactggacgaagaatcggttctccagggatattcagtaaatcctttgaaagataagttggcatgtgtcaatgatttaagaaaacgtattctttgttacagaaacagaaggaatagtccgttattcttaaaaaacattcgtatctttgctgatacaagtcgaaaaggaccttccggatatgaagcacataaaggcagttgccggatacatattgattctttctctctgcctcgtgtgtgcacaccctgcccatgcggagacgcggcgtattgcgctgatacactctttcgagccgggctatccacctgctgcgaaggctttggaactgttgcaaagagagttcagtcttctcggcttggactgcgatgtacgcgaatactatctggattgcgaccgctacatggaggaggcagaaaacctccgtatggctggtttcgtggacgacctctctgcctggggagccgagttgatagccgtgctcgacgaccaggctgcctatgcgctgatggcatgcagacacccgttggcgcatgagatacccgttgtgttcagcggtgtgaactatcccaacatatccctgctcctgcaataccccaacatcacgggctatgccgacacgcccgattacttgcgtaccatacgtatgatagagagtatcatgggcaagtcgcgcatctgcctgatgaacggacaagtgtttctggaccgcaagatatggcatgcgttgaatgagcagtgtcgttggcaggggttcgccatcgtgacctctacagagggtgcttactttgccggttcctcctatcaccgtgtgcgcgagagggagactatcagccctatactgaaacggcagaacatagacgtgttgctggacaccacgaagattgtgcgcatgacgagcgactccatagcgatacgccatctgatgtggttgggacgcggcgacaatacgttgctgctctacaccaagcgagactataccaccaaacgtgtgggcatgcttttcgacaatcccacgtttcagaccatcaacgagggcttcggctttgccgactacttgctgggaggatatttcactccactggaaagccagataagatacatggctaccggtatcaaggaacgtcttgaaggacggatgccccggcagcaggtgacggaatgcgccaagcagtacgtgctgaactggcatgtgctgcagaagtatggtatcccgctcgagagtatcccggtggagtacactgtgatgtatattcctttttcggagcgctaccgctatcctatacttatcggttccatcttgggcgcagtcttcgtgctgacggtaatagtcttgctctccttcagcctgctgcgcgaacgcaggcgcaagcgtgaggcactgcgaaacctcctctacgagcatgagaccctctgcctggccattgaaggaaattctacctacgcctggcgactggagggagattccgtgtcctgcgattctcagttttgcgagcttattcatcatcgccccggccgtcttctgctcgatgaaatcactccctacattcatcccgacgacttacccgccttccgcaagaacatagcggcaaggcatgaacacacgcaccacaaggggcagtatcgctgtaacttcaccggtgagttccagtggtgggagttcagctacaataccatccacacccccggacacgcacccatcatagccggattgctgcagaatatccaagaactgaaagaccacgagcaggagctgatagaatctcgcgagctggcagagcaggccgaattgaaacagtcgttcctcaacaacatgagccacgagatccgcactccgctcaatgccattgtcggcttctcggatatgctagccaatgagccggagttttcagacgaagagcggcaggagtttgtggacatcatcaataccaataccaaactgctactgaagctggtgggcgatgtgctggaactgtcgcgcatcgagtcgggtaacctcttgttcacctttcagcgggagagtgtgcaccggctgctcgatgacgtctatcagacgcatagcctgcttatccagccgtcgttgcagttcctcaaggatttccctcccgaagatgtgcaggtgaatgtagaccccatgcgactgacacaggtactcaccaactttctgagcaatgccaacaagtttacgaaaaaaggcagcatccggctcgggtattgctgtccgttcggtatgagcgaggtacatctctatgtggaagataccggcataggcattccgcacagcgagcagaagatgattttcgagcgtttctacaagcgtagcgagttttcccaaggcgtcgggttgggcttatccatctgtgtgctcatcgtcgaaaagatgggaggacgcatcgaactccagtccgaggaaggccgtgggagccgtttcacagtgatactgccttgtattgaataaatgcttaaaaaatgtaatcgtgttgtaacaactttatatataattttgcgtatctttgccaatgttttaagaaatataacgttttaagaaactaatttaaaagacattatgttaaagagagtaagaattatactgacggtgctgctgttactggccgccgtaggtctagatgcgcaggtcaccacagcttctatggcgggtaaggtgacggatgcaagtaatgagcccattatcggcgctactgttcaggcggtgcaccagccttccggttcgcgctacggaactgtgaccaatgtcgatggacgctattccatccagggtatgcgcaccggtggtccctatcgggtggagatttcctatatcggctatcagacagttatttataaggacatcactctccaactgggcgaggtgtataacctgaacgtagagatgagcgaatcttctgagctgctgaacgaagtgattgtgacggcggccaagaccaagttcaccgccgaaaagacaggtgccactaccaacatctcttctgcacagataacgcagctccctaccgtgaaccgtagtatcagcgacatcgcccgcctttctccctacgccaatggcatgagctttgccggaggtgacggacgttccacgaacttcaccatcgacggtgccaacttcaacaacaactttgggctgagttccaaccttcccggtggcggcaatcccatctcgatggatgccatcgaagaagtgcaggtagttgtcgccccgttcgacgtgcgccagacgaacttcatcggcggtggcatcaatgccatcaccaagagcggtacgaacacattcagaggtactgcctatacctattaccgcaaccaggacatgcgtggtaaccgcatcaacggcgaggacctgggagcacgttccgatgagtccaagactacctacggctttacgctgggtggtcccatcatcaagaacaagttgttcttctttgtgaactacgaaaaagagaagactccgggagaggttataaaatatcgcgcgcgcgaggacggcgaagatgcgaaaggtatggtgtcccgtacactgaagtcggacatggagaaggtgtacaaccatctgaaggacaaatacggctatgatgcaggctcctacaccaatttccctgccgacgaggagaacaccaagctgctggcccgcatcgactggaacatcacggaccgccatcgcttgagtctccgctacaacaatacgaagaatacggcttggaatgcaccgaacggtaactcttccgatacaggataccgtttgaacaatacttaccgcgtaggtacgcagtctatggcgtttgccaacagcatgtattctatggacaacaaggtgcagtcttgggcggcagatttgaatagtcgtttcaccgataagatttccaatcagttgctgtttacctacaccaatattgaggacatgcgcggcaccaattcttctcctttccccttcattgacatcatggcaggcaaggacgagaatggaaaccagattctggaaccgtatatgagcgccggttacgagctgttcacttacaacaatggtgtgaagaacaagattacgaacattaccgataacttcactttcttcaccggtaaccacaagctgacggcaggccttagctacgagcaccagtttgccaataacgcctatatgcgtaacggtacgggatactatcgctacaacagtctggaagatttcctgagtggcgcagctcccgaatcattcgctttgacttatggtttcaacggcgtggctaaccccaatgcccaggttaccttcaaccagcttggcttctatgcccaagatgaatggaatctcggcaacagtctgaaactgacctacggtatccgtttcgacaacttgatgttcgacaacgacgacctccagagaaacgatgccatctatgagcttgacttcgacgggcagcacatcgacaccggcaagtggccggattccagatggcagatttctccccgtgtaggtttcgtttgggatgtgttcaaggacaagtcgctgaaagtacgtggaggtacgggtgtgtttacgggacgtctgccgttggttttcttcaccaatatgccgaccaatgcttctatggtacagaactccgttacctttaagacccaatatgacaatggaaaagtggtgggccacgattcccgtctggatcagttggcaggtggcatgattacggacatgaaccagataatcgacaagttcaacctccccaccacgattgagaaacacgtggcggggagtaagatttcgggtgtggccaaggacttcaagatgccacaggtgtggaagtcgtctattgcggtggattatcaggtacccgtatctttccccttgaccgtgacgggagagttcatgtttacaaagaatgtgaatgccgttaccatcaacaatatcaatatcaagaaccccgacgaatggaaatacaataagctgaccaccgtcaagggcgctgatggaaaagaggtgataactacggaactgctgcatacaggtatgcaacgtttcaatggtgcggataaccgcatggtgtactcttattctctttatgacaaccccgataagaatgtgaaatatgcaggcgacttcgtgcattacaatggcaagaatgccgtggtgctcgacaatacatccaaaggctacggctatacggcaaacatcacggtgaatgcccagccgttggacgacctgatgctgatgctggcctatacgcacacggagtccaaagaagtttccggtcttccgggcagcgaccccatctctacctggcagggactgaacacgattgacggttccaattatgtggatgcacaacgttcacagtatgtggttcccgacaaggtgattgcttccgtgggctactacattcccttcagacacaaaggcctgcttcgcggcacacacctgaatctgttctattccggttattcttccggcggttacagcttctgctacaccaatgacatgaacggtgacggcatcaacaacgacctgatgtacattccgaaggacgatagtgaaatcaacttcaagacagaggaagaccgcgttgctttctggaaattcgtagagcaggattcgtacctgaagaatcacaaaggacagtatgccgaggcttatgctgcccgtgctccgtgggtgcaccgctttgacttccgtctgctggaggattttgaattcaagattggcaagaccaagcattgcttccagttgagtttcgacatcatgaacgtgggtaatcttattaactccaaatggggtatctccaagaccaacaccgtttccaacagcaaccgaatcctgaagtatgaaggggtgaagagcgtcactgatctgactccggtattctccatgtataaggtgaacggtgaatatcctaccaagacttacgacacctatcagaactacagcgaatgctggaagttgcaagtcggcatccgttatgtgttcaactaaccggatgtagacaacctccgctgaatggcggaatatgatgaggcaagggctgtcccggaaattccgggatagcccttgctgttttgggctttctttactttattgtatttcaacctccataatcactggattgtggtcgctgcacaaatccaggtccggagagtagtatgcaatacccttcagactgggggagtggaagatgtagtcaatacgcaacatgcgtttggcatagcggtaggtgtacatgtatccgtttccggcagtgcggaatccgtctttgagggttttcctcaaatggtggtaggtgtaggaggaaggtatcgagttgaagtcaccgcataacagcacgggataggggctggccttggcgtagtggctgatgacgtaagcctgtgtggcccgtttcacgaagttttcgtgcagggtgcctgcggcatctttggctgcctggacttcgcggcgggtgtcgtcggtggccagctcgcgttcccacttcctgcgcttctggctgacgctggtggtctgcaggtggttgtttatcagacgtatggtatccgtatccatcactacatcgcacatcatgctacagttggagctgcgctggtaagtgatgaaacggtggttcgccaatggatagcggctgaatacggcgataggcagtacgcccttggagtcttcggaagggatgagcgcgtgtgaccaatgcgagagtatgcgccgtatgctgtccgtggggaagtcgctgttgtctccgaactcctggaagcacagcacatccacgccctcctgctgcatgtaccgggctatctccttgcaggaataaccggtaatctcacctccaaagttgtgtatgttgtaggtggctatcttcagatacttgcctgccggggttttgtctttcggcaggtggagctggaagacagacgtcagatatccccagttgcagaagaatgccgccagcggaaccagtgcccagcgcttatgggccaatgcccagcagagtgccgttatcagattgacaatcaggagtacgggcactgccagccccagtaatggcatgatggcggaatcgaccggagccacgtttcctgagaaggctgccactatggtgatggtggccaaaacgaatgttgctgctatcaggcagatgtagaacagaccttttacggcggactttcccatgttgtttgcttgtttgttttgttatggtaccctgccatacagagcttgttacagcatctcttccaccgggatatacagcgaagagatgctgtaatgtctgttatttattcactacgttcaccggcttgccgtcttggtaggctttgatgttttcgagcataatcagcatgaggcgttcgcgcgcggccgtgcttgcccaggcaatgtgcggagtgatgtagcagttacgggcagagagcaatggattgtcggcacggggaggctcctgcgagagtacgtctacgccggcggcatagatggtgccgttgttaagtgcattggcaaggtcttgttcgttgatgagcgggccgcgtccggtattgatgaggatggcggtgggcttcatcagccggagccgttctgcattcaccatctcgcgggtggagtcggtgaggggacagtgcaggctgatgatgtcacattcgcggaacaactcgtccagctccatcttgcggatttcgggaggaagctggaagttggtcttggaggtgtaggcacataccttcataccgaagccgatggcgatgcgggcggtggtgaagccggtgtgccccaggcctacgattccgagctttttttcgcgcagttcgatgagcggcgtgtcccagaagcagaagtccttgcttgctgtccagcggcctcggtgcacctcttcagagtggtgttgcacttgctgggtgatgttcagaatatgggcaaagaccatctgggcaacggagtcggtgctgtaggcgggaatattggtgacaatgatgccgcgttctttggcagcggcggtgtctacgatgttgtatccggtagccagcacaccgatgtatttcagttcgggcagtgccgccatgtgctcagcggtgagcacggttttgttggtcagcaggatttctgcaccagcggcgcgttccaatacttccgcaggggcggtgcggtcgtagatggtgcactcgcccaaggcttgcaattcgtcccagcaaaggtcgccggggttggcggcatagccgtctaatactactatattcatggagttataagttatttgttgtggggattttctgtatccgagttttaatctctaacttttaattttaattgatagtttaccatttcttttcctctccccagagttgctgcatccgttccttgtgcttctgctcggcagggttgagttgtggctcccagatacggcggtctttcaattcgtcgggcaggaattgctgcttgacgaagttgccggggtagtcgtgagcgtacttgtacttctcgccgtagcccaactgcttcatcagcttggtaggggcgttgcgcaggtgcagagggacggggaggttgcccgtttcacgtaccagttccagggcattgttgatggccatataggcggagttgctcttggggctggtggcaaggtatatggtggcttctgccagtgggatacgtccttcgggccatcccactttcatcagcgtgtcgaagcaggcgttggcaagcagcagtgcgttggggttggccagtccgatgtcttcggaggcggagatgacgaggcggcgggctatgaaggcagggtcttcacctccttcgaccatgcgcgccagccagtagatggcgccatccgggtcgctgccgcgaatggatttgataaaggcggagatgatgtcgtagtgcatctcgccgtccttatcgtaggcaagagggttctgttgcaggcgttcggtcaccatgtcgtcggtgatgaggacagggtctgcggcttcggagtctaccaccagttcgaggatgttgagcagcttgcgggcgtctcctccgctgaagcggagcatggcggtggtttcttccagttctatcttccgttccttcagcacggtgtctgtggtgatggcacgttgcagcagttccagcaggtcgtccttctccagtgacttcaaggtatagagctggcagcgggacagcagcgggcggatgacctcgaacgaagggttctccgtggtggcgcctatcagcgtcacggtgccttgctccacggctcccagcagtgagtcttgctgcgatttgctgaagcggtgtatctcgtcaatgaagaggatgggactggcttgcgagaagaaacggttgctcttggcgcgctctatcacgtcgcgcacgtccttcacgccgctggtcacggcactgagcgtatagaaaggagtttccagcttgttggcgataatctgcgccaaggttgtctttcccactcccggaggaccccataggataaacgaagagatacgtcctgcatcaatcatcttacgcagcactgcacctggtcccactaaatgtttctgaccgatatattcatctaatgttcttggtctaagccgttctgctaatggttgcatagtatgtaactcttaaaatatcattaatatcatgaagcgtataccgcccttcttcactcccggtatgtccgtataggtcagcctacgtacatattctatgtggagcagtttgaagatattgtagatacctacgctggcttccacatagggagtcttgcccatgacgtggctggtgggtacaccgtcgcgcatggggaagaggaataagtcgggattgttgctcttgtacgggttgttcttgtccgtcagcgtgccccacaagccacggatgcggaacatctcgcgccacttcagcttcttgatgagcgggatgcggttgaagagttttccgttcatgtcgtagcttaggttgagggaggcgtagcggtcgttcaggaactccatgttgttgatgaggttgaaggactcgttgttctgcgtgatgtacgagaggttcgccatcggcaggttcagcagggggaagggaacggtgttccattgcgcaccggcacgtgccgttacgtccagcttgccccacgagccgagccagaagcgcttgcggatgctggcttccgtcaggttgaagttatactctccacccagcacgcccttgaatccggcggtgtgggagagggtgaaggtgggcgcatccaacgatacgggcacgcggcgttgcttggtgttgacgaaggtctcaccgggagcgtaacgcaaagtcacacccagctcggtggtggtgatgtcgtgcaccaacgtatttttttcgtcccattgtccgggtgtccctccgttgttcttccagtattgcaattgtccggcaggctggtcgttacgatggcgcgccatggcctgtacggagaagccggtattggtctccagctcgtaagtcagcgtggcgtcgcgcatgtaggacatctggtccaccgtcgtccatttccagccgacaaacaagttgtccttgtccgtggcgagatacttgtccatgggagacatcacgtcgtaggtgtacttgaaggcgatatagtgtttcgggaactcccacaatacgtattcgcgcttgttgaaggagtaggccacctgtccggagtagaaccatttcttgtccttggttccgtaggcaccgtagccgctcaggctccaatgcgggtcaaggttacctgttgtcataccgctcagacggaagcgcgtgccgttgacgtagttgctggttatcatcgtgttgatgggaccgaagtcgaacttgctgggatgcttcttgccacccgtctccacgaagttctcaatcaaggctttcgccccgaagataacgtacttgaagccgggaatctgctcgatgcggttcatgaatacgtccatcgtgctctctttcttggtgaggggtacttggcggactttcgcccagtattcgtcgctcttggcaagcatgttcgcttccttgatgacgtttcctttcagacggaagaggcggggctctatttccgtgaattgatagtcgctgtatttggtggtccgttgcacttccaggccttggatacctttcacgaagtgtagttccacggtcatgtcgtcgtcggtcaacacccagttgctgtcgggcagttgttcgaactgctgcacgatgtcgaggttttccacgaagttgacacccgtcttcttgggtaggttcatggtacatttcttcacggcataggtggagtccttcaccacgtaaaggtgccccgtgaaaccgaagtcctgcgggttctgcggaacgaaagtcagatggacgcactcctgcttgtccaccatgagtgtgtccatcagatagtacttatagaagctgatggctccgcgaccgatggggctgacgaagcggcgttgcagcagccggatgtcgtcgtcgtagatgttgatgtcggagaatacgtccgtaaggatggtccccagcatgtctccggtgttgaagaactcttcgataccagtggagttcatgccttcgatgatggtcttttcgctcttggggcttttacggaaaatggtcttgctcgccgtctccttgatggagatgggtagaatcatcttgttggtcttgggcgatacctccacctggtctttgaagaaggagaatttcttgtaaatacctttctccattttgtcgggggtaacgtcgttgagcgacatcttcatcttttcatatttctgatactgatagtagtcgttctcttccagtttcaaggccttcttgttctcgatgaccttcttcataaactccacggcggggttgttcttgcgggaatatttctccttcttgggtttcacgacgacctcggagagcatgatgtcgtccggttgcaacttgacgttcagcacccgggtaccgggattcagtttcactttcttggtgatataacctacagcggagaatgtcagctcatcccagcctttgtgggtttcaacctggtattcaccgtttgcgttggagatgccgcctacacctttcccttcatactgtacggtgatatacatcagcggttcgttcgtgagagagtctgtgatgacacccttaatttgggcggatgcgctgatggagacaaacagtgacagcaggaaaagggcataaattatatatctttgcttcataagttacagataattcgggcacaaagttaacaaattaaggttaatcaagaagcaaatatagactaaagaaacgggagatatggttaaatgaacgtgaaagtcgtatgtcttgtttgctggatacagataaaaaatgtacggaatccttgtagagaagttgccggatataaaggataaagttgcgcaatgtatggagaaagctctatcccaagccttgggatagaaagacccaagcttgggataagcgtccgtaggtttgggatagacgtttgcaagcttgggatagaatttatggaggattatgaattgttgccgttcagtagtgtctgtacgatgcgttccgccgtccgtccgtcccagcggtcgggtaggatggcgtgcttccattctccgtgcagcagcttgtcgagcgaggcggagagggcgaaggagttttcgccgaccagctcgttggtaccgatacgccaggtttcgggatgctcggcgtaggtgttgagggtgatgcaggggacgtcaaggaaggtggcttcttcggcaatgttgcccgagtcggtgacgatgccccgtgcctgattgatgaggaacccgaagtgcaggtagctctgtggaggcaggatgtgcaggttaggggcatccagtcccagtgacttcactgccttttgtacgtaggggtgcagaggggcgacgataggcatgccgtcggctttttcgatgacggtttggagcagggagtgcagcacggccttctttgccagcaggtcacggcggttgagggttagtagcaagtagtttcctttccgcaggccgaggctggagaaccacatgggctgcaccaggcggtggcggttgaagcggatggtgtcaatcagtatgttgcccacgtagtggatatagtcgggtatcataccctcttggttgagattgcggttggccaccatgccggcagtgaagagatagtcggagatggcgtccacgatggttcggttcacttcgcggggcatgttcatgtcgaaggagcgcgtgcctgctatgacgtgcgccaccttcagcccgcgcttcttggcgacgatggagcaactcatggtggcggtcatgtcatctaccaccagtacgacttgtgctgggtgcccgtccaactcgcgctcgaaggcaagcatgatggaggctgccacctgcgagtggtcatgtccggtgacgccgaggcaggcatccggtttcctcatagagaggtcggagaagagcgaggcatccaggctggtgtcatcctgcggaccggtgtagacgatgcggtaggagatgttctttcctgcctctctggcggcgtcgatggcgcggcagatgggggctattttcatgaagttggggcgtgcgcccgatacgattgttattttcattggcgtaattggtaaaaaaatgtcgatacaaaaatacgctttcttagggaaattatttgttactttgcctattattttcagagtgtctgttgaaatatgtattatctttttcggttttggatactcggatttaattttggatactcgaagcacttgtttaatttttaatttttaattctcaaagtgataatgccaacatttgttcagatactcgatttcattggcacatttgcctttgccattagtggcatacgtctggcctcggccaagcggttcgactggtttggagcgtatgtggtgggttttgtgacggccatcggaggcggtacgatacgcgacctgctgctggacgtcaccccgggttggatgacggaccctatttatttgatttgtaccggactggccttgttgtgggtcatcctcttcggtaagcatctcatccatctgcacaatacattcttcatattcgacagtatcggcctggcactgttcacggtcgttggtgtgggcaagagcatcgcgctgggctatcccttctgggtggccatcatcatgggcagcattaccggggctgcgggaggtgtgatacgtgacgtattcatcaacgaaattccgctgatattccggaaggagatttatgcgatggcttgtgtggtgggaggaaccttctactggatgtgccaccttttggggatggagtctttcgtgtgccagattgtgggtggtgtgacggtgttcgttacccgtatactggcagtaaagtataggatttgccttcctatcctttcgggtaatgaagaggagcaggaaatgtagtccgttgtttgcagtctgaaaacctcagggattttccggtgaaactcggacattccggagaagcacttcccagatgttttaaaataagattccccggcattttcaaaccgaaatgtcggggaatttttcatatgtctcgttccccttattaaagggagcgaggataggattgctaaagagataagactaggttagaacaatgcatccttcgtgttgaagagcttgcgttcgttcagtttcactaccttgccgaatttctccagccgcttcaggtcgatgtccttcgggttgcccatgatggagatgcagtaaggtttgcctttgatgttctcttcgtagaacttcacgatgtcgtcaaaggtcagtgcatctactttcggcaggttttctttggctgggtcgtccgtgtagcctctgtagcccaagtctaccagttccatagctttgttgcggaagctggggtggctggtcagcatggcttggcggaggtagctcttgatgttgccgatacgttccggattcttcggcatgtcattgacgagactcatcagtacgtccaatgcatcgtttgccttgtcgttctgggtaccgatgtagccgcgcaggtagcttgcttttccggctatgccttgcgtgccgacgaatgcgtaggctgtataggccatggagcgtttttcgcgtatttcgttcagaacgatgccggtgaagtcgagaccgaagtactggttgaatgcgctacgcagcacgtcgtccttcttgtcagccttctgcatcgggatgtagaggtggatttgggcttgttctgcatcgttgttaggcaggaagtagacggtgttttcggttaccggcatcatctcctttgcctgcggggagttggacgggcgttcgttggctaccaacgggaggttcttgctcaggatgtcgtatacttggtcgaaggggagtgttccggtaaagaatacctttgcctcgtagttggaggcacggttgatgtcgcccgtcagttctgaaatctgcaattcgtaaatctccttgtcggtcagctccttgatgtagtctgatttctctccgtagagcatgtactggcgcagcgcttcgttcaggatgctgacgttgtctttacgctgctggcgcatacccattgccgaacctttcagacgtgctagttgcttttcgtccaatttcggcatcagaatctggcgtgaaagtagctggcaggcttgcggcagggtggcttcgtagccctccatgatgatgtagaggttgtcttcatcggctgtcacgtggcaggttgcgttcagcttgctgagttcttctttcagctcttgcggttcgtaggctcccatgatacctgcgttgttcatcagttgggcggcatagcccagtttcgggaattcgcgttcaccggctccgtattgtacaatcagctggaatacgttgttctccttgttgggcgtgtagtacatcttggaacggtcgttcagctgcttgatttgcacttcgccgtagtctgcgaatttctcttccatctgtccgatgggcaggttcttgaattgcgttgcataaagcgattccttgcctaccggaggttctacgggtttgtaccccggcttctcaatcttggcgtttttgtcaggtttccctttttcgatatatagggccaggtagttgtccgacaggtatttcttggctacccgcttgatgtcgtcagtagtgatggccataatcttgtccttgtagttgagtatgtcgcccaaatcctgctcgttgtagaaggcgttcatcagtatcatggccttgtcctcgttcgactccatttccaggtcgaactggcggcatttctcggctttgatggcatcaattttccagtcctcgaattctccgttggcgatttgctggatggctttcaaggctttcttttcggcgcttttggtagactcgaaacggcgctggttttcgtcgtagaggggaatggccgctacgatggcgcgcccttgttcacggaaagtacgggtgtaggctccggcgctggtcagctcaccgtccagtaccagcttgtccatggttccggtctggctgttgttgttcagcagtgccagggcgatgtccagagcatcttcgtcgggatgtccggcaggcactccgttgaataccattgccacttgcgggtagaatcccactttggccgaatattgtttgcggccttttatttcgaggttctggtagaccttgcgctcgggtgcgggctttgcagccagacgcccgaaggcggcattgatgcgtccgctgatttgttgggctttgatgtttcctacgagtaccagtaccatgttttcgggtacataccattgttcgtagaattcaatcagcttgctcaggcggggattcttcagatgttcgggcaggccgatgatggaacgggagtaaggatgtccctcaaaagctttctccatcacgaactggttctgtgcacgtccctggtcatcttgtgaacggttatattcttcgtacacgttttccagctccgactggaaggaacggaatacgggatgcaggaaacgttgtgaggaaatctccagccatttgtttatctgataggcagggaaggagctgtgatagaaggtccagtcatagtaggttcctgcatttacccctttggcgcccatgctttccatcaggttggagtattcattgggaagccccagctttccggccttgacggtcagctcattgatttccttgctgatggcttctttttttaccgggtcggcttcttcggccatctggtcgtacttggcgatgatttccttgtagatcggttcttcttccgtccagttcagcgcgcctatcttgtctgttcctttaaacatgacgtgctccaggtagtgtgcaagtcccgtgtactcttcggggtcgttgatggaaccggcacgtacgcctaccagtccgaatacgtccgatttggattcgtcttcccatatatatacggaaagaccgttcttcagcttgaacgctttcagtccttgtccaaaggagggcagggagatgatgacggcagccagcagaagaagtgactttaattgaaatgatttcataaaataaagtgtttttatgtaataaaagtgtttccctatatgtaggcaaagctataaaaaaatcacgtaacatttacgaaatcttcggaaaaatgatgattttcagtacatgatatcacccgtaaactatcatagagggggtggaaactgtcaaatgatagtttttacccctaataaaaaccgtattccgtcccccggagcttcaaatcttccttatacttgcaaccgtaaaacctaaaccattattaactatttaaaaattgagcaaagtatgaatacttacagttttagaaaagatttacttgcagtgcaagaagaactgcttcgctttgcatacaagttgacagccgaccgggaagaagcgaatgatttgttgcaagagacgtctctcaaggctttggataacgaagacaaatttgaacccgacaccaatttcaaaggttggatgtataccattatgcgcaacatctttatcaataattaccggaaaatagttcgcgaacagacttttgtagaccagacggacaatcagtatcacctcagtatgccccaggactctggttttgccagtaccgaaggtgcctacgacctgaaagaaatgcaccgcatcgtcaatgcccttccacgcgactataaagtccctttctccatgcacgtgtccggtttcaagtaccgtgagattgccgaacgtctcggtcttccactcggaacagtgaaaagccgcatcttctttacacgtcagaagttgcaggatgaactgaaagatttcatctgataatagtttggtagtagcaatatgatatataacatattgattgcgatgaatttttaaggattattcttaactatatgtcagaataatcctttatatttgtatatgttaagttaaccgaagaaaaaaatctcttattactgactatgatgaaaaaggaaattaaattcagtcttgtttaccgggacatgtggcagtcgtccggtaagtatcaaccccgggtagaccagttggtacgcattgctccgttgatagtagaaatgggctgttttgcacgcgtcgaaacgaacggaggagcttttgagcaggtaaaccttctgtacggcgaaaatcccaataaggctgtacgcgcctttaccgcgcctttcagggaagcaggtatacagacgcatatgcttgatcgcgggctgaatgcactgcgcatgtatcccgttccagcagatgtgcgccggctgatgtacaaggtgaagcatgcccagggtgtggacattacccgtatcttctgcggactgaacgagacgcggaacataattccttccatcaaatatgccctggaagcgggcatgataccgcaggctacgctctgcatcacgtattctcctgtccatacggtggaatactatgccggtattgccgaccggttgattgaagccggggcacccgaaatctgcttgaaggatatggctggcatcggacgtccgggtatgctgggacagcttgtcagaaccattaaggagaagcatcccgatgtgctgatacaataccacgggcatagcggtcccggactttctatggcttccattctcgaagtctgcgagaacggtgccgacatcatcgatgtggcgatggaacccatgtcgtggggcaaggttcatccggacatcatctccgtgcaggccatgctgaaagatctgggtttccaggtgcccgacataaacatgaaagcctacatgaaagcccgtgccatgacgcaggagttcattgacgatttcttgggctatttcatggatcccaccaataaacatatgtcctcactcttgctgaagtgcggtttgccgggtggcatgatgggctccatgatggccgacttgaagggagtgcattccggcatcaacatgatactgcgcggcaagaatgagccggaactcagtctggacgacttactcgtcatgctgttcgacgaagtggaatatgtatggcccaaactgggctatcctcctttggtgactcctttcagccagtatgtgaagaatgtggctctgatgaacctcatgcagcaagtaaagggagaggagcgctggacgatgatagacaaccatacgtgggacatgattttgggcaagagcggacgcctgcccggtactttggcgcccgagatagtggaactggccaagtccaagggttttgagttcgtggatacggacccgcagctgaattacccggatgctctggatacataccggaaagagatggacgaaaacggttgggaatatggcgatgatgacgaggaactcttcgagcttgccatgcacgaccggcagtatcgcgactataaatccggcgttgccaagaaacgttttgaggatgacctgcagcgtgccaaggatgcggcgatggccaaaaacggatactcggaagaggaaatcaagaagctgaagcgtgcaaaggcagacccgataatcgcgccttccaaagggcaagtgctttgggaggtttccgtcgaaggtccttcttctgctcctttcattggacgcaagtaccagcatgatgaggtgttctgctacatctctacgccgtggggtgaatacgagaagatatggaccggatttaccggacgtgtggtggaagtctgtgccaagcaaggggatgtggtcaataaaggcgatgtgatagcctatatccagcggagtgatatctttgcataaatgagaacttgaaaaagtggaatttcactgaaagttgataacgtagtagggtgataatgcgatagtttatcaccctacagtcctttcagtcatcctttattgtccaaccatttcttgatggtttccttcagtacttcttgggtgaagggtttggtaaggaagtcgttgcaacctgcttccagggcagcctgcttgtcgtgttcgtaggcataggctgtaagggcgatgatggggatgtccggcgccagttcacggatgatgcgtgtggcgtcgattccgtcaaggttgggcattttcatgtccatcaggatgaggtcgggatggacttcctcgaacatagttacggcttccatgccgtctttggcatgtttcaaccgatagagccggcctaaaatggcgttaattaggatgaaattgctttctgtatcttcggcaatcaggatggttttggaaggaggggtagggagtgttccggcttcttcattcttcggggaagttccgggggctgtatttctgctcctctgctctgtggaatgtgcctttgctgtcgtttcccggttgttctcttccttcttttccatctctgttttgctggaggattccagtgggaggacaaaaataaatgtggtgcctttacccacttccgaagtgacggatatgttgccgcccaggcgttcgatgatagtcttgcagatggaaagtcccaatccggtgccttgggcaaagttgttcaccttgacaaaacgttcgaatatctggtccactttgtccggtgcaattcccatacccgtatcggtgacgtggaatgctacatacttgccttcccggtgatacccgtaactgatgtacccggcgggggtgaacttgaaggcattgcctatcagattggaaatgacctggaaaatccggttcttgtctccgtcaatcacgatattctcgtcagagggttcgtatatcagctccactcctttgggacagcggaaaatatgtgcgtcgtgtatctccttgcagagcggatggaggcgtacgggcgtgatggtgaactccacgatacccgattcgatttttgataagtcgagaatttcgttaatgagctggagcaggcgttcgttgttcgattctactatttcgtaatagcctagccgttccttctcgtcggtgctttcggcaatgatgcgagagaagcctacaatggcattgagcggtgtgcgtatctcatggctcatgttggcgaggaaagcggatttgagctggtcggaagtctcggctttctccttggctacgagcaattcccgtttcatctgttccatttccgtgatgtcccattcgatgttcagcaggatgggggagaagtcgttgctttcaatcttcatctttcgcttgtccagatagatgggggttccgtttccgtcgcgttcttccgcaatccagtgcatctctttgccggtcctggctatttcaatgtcttgtgctcttttttcctgggcagtctccaggggataaaagtcgaagtcgtctttccccaatgcctcttgtatggggatttcgcggttgtacgattcgcggttgcggtagaggtacttgaagttgttgttgatgtccttcacaacaatgcctgccgggaggttttcgatgattttgtccagaatcaggttgaactgtttgatttgttgctcatgccggatgcgtgtggatacatcccttccgaaagtccagaccgtcccttcgcctttgtcactcgtcacccaataggcgtttccttctatggcgagtacttccggacgcagtggcaacggattgtgaacaatatagccttgggaggtttctccgcgtttgacacattctgcaaattctttccacgattttttgtctcttccatacgaaggcaagtcgtatattttcagtttcgtgatgtcttgggtattgccgatgccatgtcgctccttgaagcagcggttgccgaatatcagtgtaccgtcttcgtgtgccgagtaaatatcttcggtggagttgttgatggcatgtgtcagcaagttgatatcgttgcgccgttgctgaatgtcggtgatattctgtatatatccttccagaatggtatttttgtctttatgatattcgcgtgcaaaggccttgagccgtatatagaaaatcttttcctgaagcaagatgcggtagtccacactgttttccattttctcttttaggttttctttcagccagttggtgaaagatttccggtcttcgggaagtatcagtttcagatagtcgttcagattgatttcttgtgtctcctctgtgcataggatatcggtgtgtccggcatatttgaagctttgggtgtctgaatcgtattgccagtttccgataagcgcagctttttggatttcattcaactcttggttttttctttcgagttccagcttgcgctggctacgttccgtgatgtcgcggtattggcagagcaccattccgtcaaagggggacatgatacacttgaagaaataagtggtgccgttcaaggccatttcgtaattatgggtagagcgtattttgtgcgtcagtactcttttaaagtccggatagatttggttataagtggataagggaattagttggaacagattcttgcccagtaaccggtcttccttcaagaaccagagattgatgttgtaaactgcaatgtccacacaaataccgtctttgtccagaagaatcatggtgtcggatgtcagctttaacagtctttcggcgttttcaggttgttttaaaatgtttttcattcttatagtattagtttcatgcccttctggccttctcccatgcgccgcttgcattgtctttacgtttgcgcaggtagttgaatcctcgtatgacgttgacgttcataaaaaggaaatagtaggggatgaaaagtatcttgttctttatatgcttcgttgaaaggtagtacccccaacttcccatgagatagaaaaaagcttgtaacagccagatgatggcatacagtaatggcgtgcttgtcgtaaagatgagaattgtgttgaggggaagcaatagaaacaataggataggagtgagcgaccagcgcagcacccggtgggaaatatattggaaacagaatgtgccgtaacggaacgggttgagcagcggacgtagccgccagatagactgcaagccaccggcagcgatgcgcaccttgcgcttttcttcctcgcgcatatctgccgagccgctttctacggcataggcattggcgcaataggcaatggtgtgtccctgcatgacgatgtgcagggagagtgtgaagtcgtcgagcaacgtgtctgtttgcatttcttcgaacagattgcggcgcatggcaaacaactcacccgctgctcctactgctgaatagaggcgtgcgtcgagcgctttgagggtggattcgtatttccagtacaacccttctcccccagaggcagcattgtccttactttgcacagcaatacgtttttcgcctgccacgcatcccactttagggtcggtgaaggcgtgcactatctcccgtagggcttttgggttgaggtgcgtattggcatcggtgaatacgacaaggggcgttcctacgaaatgtataccgcggttcagggcggctgtcttgccttggcgttggggttggtggaggacggtggcttgcggccagcgggagaggcgttcgttggtacggtcgttgctgccgtcggtcacccaaagaatgcgtagcttgtcggcaggatagtccagctccagacagttgcgcattttttcgtccactacatcttcttcattataggcggcgataaacagagtcaatgggggcaatgcgttgtcggtgggcataggccagagggtaggtgtgtggaagcactcttttatcttgaccagaatatataataatataccatagcctatataggtatagaacactatgaataaacttatccagaagagtatctcaagaactttcatgcttctgttttgtttgctatctttttgaggaaaaagaaatgtgattgccaaaagtatggataatcttttactgatgcaagaaaaagaaaagaaaaatgaaatgtttgtgtctcaagaggtaaagtttggttttcagggcattttgatgttataatcattctccataggagggagacgggcagatacggcaaggtaaggcgttactcaaaacgcttctgtcatattgaagtaaaacaacatctggttgtttaccgtgtttttgcctaaatccaggcggacgttcatgcgtggctgtacctcaatgcgtagacctacaccatagttgggcagtacgccctctatcttgccaggagtggggcccatgaagccgcacccggtccaggctacaaaacctatgtggttgagcatccgcttcagccaggtgctgcggtcggtattgagcatctgccggtattctgccatgaccacgtgcgaggacttgtcgcgatactgccccatgtagtagccgcgcaggtcgaaaggcgttccggtgagggcgtattgcgtcagtgggacgtcgccgaacacgttcttggtctgtgccgtccacgcaagcaccctgcgcttgcccagtgacttgtattggcggtagtctatctccaggcggtagaaggtctggtcgcttccgatgaatttggtgtacatcatgccgcggaaatccagatacatgccgcggtaggcgttggcgggaacgtcacggctgtcgtatgtcagcaggaagccgaggccggagttgaagttgttgtagccgttggccgtaccgcctgcctctttgtacgaaggttcgttcaccaagaacttgccgggctccgtcaggtggtcataattgatgtctatttgaggtccggcaaagatattgctgttgcccagccggaagaggaaccaggggttgatttgcacgccgctgtatcggtatttgctggtactgtcgcttcgtacgtaatctttattggtattatagccgatgccgtaaaagttttcttccgtatttttatagctaaactttccgaagatacggaaacggtcacccttgaagaagagttgaggcttggagaaaagattgatgccaccgttgaacatgaaggcgatggccatgggcactacggagcgcaactgcgtggtgtcgctggggtttatgcggaaggtcatcagggcgcttcctcccagcacggcaccgaagtcgggagtgtagctgggtccacccagaatattgtaatgcagattccggcgcgctaccttttgcttgcgtagttctttttttgtcagtgcgggaacgctgtcgtttgtggcggccgcagtctgttcctgggcataaagggtggtggcgaacagcaccagtgcgataatgcttagtatatatcttttcatgtcgtacgaaatgtgggtgcaaaggaaactattttattccgaatagttttcactgtaatagataataaatctaaagatgtcactaaaattatcaaaaaagacattacttttgtctgcttcacgaagcaagacatcaataactaaaaacacataatctgaatgaagaaacgatttttatctgtaattgttctgagtgccgcactgctttctgtgcaggcacaagaaggaaaaggcggcatcagccccgaaatgcttgggcaaatcaagcaaagttatcaaggcacggctgccgacaaggctctccgcaatgccataggcaataatgacatccgtaaactggcactcaaccaggagaatatgcagggcatggatacccacttctccgtcaaggtagagtccagaggcatcaccgaccagaagtcgtccggccgttgctggttgttcaccgggctcaacgtgatgcgggccaagacccttgccgaatacggtttccagtcttttgagttctccgaagtctatcctttcttctgggaccagttggagaaggcaaacctcttcttgcaaggcatcatcgacacctccaagagtcccctgactgataaaaccgtagaatggctcttccagcatccgctgagcgatgggggtacctttaccggtgtggccgacattgtttccaaatacggccttgttcctaaagatgccatgcctgaaacaaacagcagtgaaaatacctcccgcatggccaacctcatctctctgaagctgaaagagtatggtctgcaactacgtgatatggctgccgccggtgccaagcccgcagctctggagaaggagaaaaccacaatgctcggaaccatctaccgcatgttggtgctgaaccttggtgtacctcccacggagttcgactatgtccgccacgatgccaagggcaatcctgtggagacagagcatcacactcccatgtctttccttgagaaatatggagacaaacaactgctgaccaactacgtaatgctgatgaacgaccccagtcgcgagtattacaagtgctatgaaatagactatgaccgccaccgttacgacggcaagaactggacttatgtcaacctgcccgtagaggacatcaaagagatggccattgcctccttgaaggacagcaccatgatgtacttctcttgcgatgtgggcaagttcctgaactccgaacgcggtctgctcgatgtgaaaaactatgactacgaatcactgatgggcaccaccttcgggatggacaagaagcaacgtatccagactttctccagtggctcttcccacgccatgaccttgatggctgttgacttgaacaaagacggaaagcccgtaaagtggatggtagagaatagctggggagctgcttccggttaccagggacatctcatcatgaccgacgagtggttcaatgaatacatgttccgtctggtagtggagacaaagtatgttcctgccaaagtgatggaattgtttaaacaaaagcctgtccgcctgccggcatgggacccgatgtttgctgaagaaaagtgatgataaggattaggggttaaggattaggggttaaggattagggattagtgggctgcactatgattccgcagggtattaatccctaatccttaacccctaatccttgttctcgtgttcgttaacgaaagggattacggaaatttctccgtaattcctttcttttttgctctttattcacgttcttttttgctacttttgcggcaaattaatgaaaccattattttaaataaacgcatggcaaatgtaattaagttacgtagaggccttgacatcaacctgaaaggcgctgctgcccaggaacttgtgtctgttaaggaaccaggattttattctctgattcccgatgactatacaggcatcactccgaaagtggtggtcaaagagcaggaatatgtgatggccgggggacccttgtttatcgacaagaatcatcctgaattgaaatttgtttcgcccgtcagtggcgtagtgacaagcgtggagcgtggtgcgcgccgtaaggtgctgaacatcgttgtagaggctgccactgaacaagactatgaggaatttggcaagatggacccgtccaagatgagcggccagcaggtaaaagaagctcttttgcaggcaggtatgttcgctttcatccgccaacgtccgtacgacgttatcgctgacccgacggtgactccgaaagctattttcatttcggctttcgacagtaatcctctggctcccgatttcgaattcgctctgaaaggagaagaagcaaacttccagacgggactcgacgctttgtcaaagatggcaaagacgtatctgggtattagtgtaaaacaaaaggctgctgcccttgtgcaggcaaagaacgttaccgtaacagctttcgacggaccgcatccggcaggcaacgtgagtgtacagattaaccacatctctccggtagtgaaaggtgaaacggtctggactatcagtgccgaagccgtacttttcatcggacgtctgatgaataccggtcatgtagacttgacccgtacggtagctgtaacgggttccgaagtgttgaaacccgcttattgcaagctgaaagtcggcgctctgctgacgaacgttttcaaaggtaacgtgactaccgacaaggacctccgctacatcagcggtaacgtgctgaccggtaagaaaatttctccgaacggcttcctcggctctttcgacagccagctgaccgttattcccgaaggagatgaaatccatgaaatgttgggttggattatgccgcgctttaatcagttcagcgtcaaccgctcttacttcagctggctgatgggcaagaaggaatatgtgatagatgcccgtatcaagggtggcgaacgtcacatgattatgtccaacgaatacgaccgcgtatttccaatggacatcttccccgaatatctggtgaaagcaatcattgcaggtgatattgaccgtatggaggctctgggtatctacgaagtagctcctgaagatttcgctctctgcgaattcgtatgttcttccaaagtggaagtgcagcgcatcgtacgtgcaggactcgatatgcttcgtgccgaaatggcataatcggggcgtatggcaaatcgtaaattgtaaatcgtaaaatcgtaaatatattaatgaaagcgttaagaaattatctcgacaagataaagccgaactttgaagaaggcggcaaattccacgcatttcgttcggtgttcgacggcttcgaaacattcttgttcgtgcctaatgccacttcgaaatcgggaacgcatattcacgactccattgacagcaaacgcatcatgtcgatggtggttattgcgttagtaccggcactgctgttcggtatgtataacgtaggttaccagcatttccatgctaccggtgccaccggcggcttctgggaaatgttcatctacggtttcttggctgtattgccaaaaatcattgtatcttatgtagtaggtctcggcattgagttcgtagtggctcagtggaagaaggaggagattcaggaaggcttcctggtttccggtatcttgattccgatgattgttccggtagactgcccgttgtggattctagcggtggctactgcattctctgtaatttttgctaaggaagtattcggtggtacgggtatgaacgtgttcaacgtagctttgattacccgtgcattcttgttctttgcttatcctacgaagatgtcgggtgatgccgtttgggtatcgggcgacagcatctttggtctggggcagtcggtagacggactgacggtagctactccgctgggtgcagccgctacctcgggcgccgttccggaattctcttgggacatggtgaccggccttattccgggttctatcggtgagacaagcgtaattgccatcgctctgggtgccattttgctgttgtggacgggcattgcaagctggaagacgatgttttccgtattcgtaggtggcgccttcatggcatgggtattcaatacaatcggtcccgacaccccgatggcacagatgccttggtacgaacacctcgtgctgggtggtttctgcttcggtgccgtgttcatggctaccgaccccgttacatcggcacgtacagagaccggtaagtatatcttcggattcctgattggtgtcatggctatcattatccgtgtgctcaaccctggttatcccgaaggtatgatgcttgccattctgctgatgaatatcttcgctccgctgattgactattgtgtggtacagggcaacatcagccgtcgcgagaaacgtgcaatcaagtctaacaattaataaataccggaaaagaaatgaataccaatagtaatagttatactatcatttatgcttcggtaatggttgttatcgttgcattcctgctggcattcgtaagttcttccttgcgcgagacgcagaacaagaacgtggaacttgacacgaagaagcagattcttgctgcactcaacatcaaggacgtaaaggatgccgaagctgaatataataaatatgtaaagggcgatatgctgatgaacgttgacggtaagctgactgagaataccggtgcatttgctaccgcttacgagaaagaagccaaagaaaataaccgtctgcatgtattcgtggcagaggttgacggtgagaagaaatatgtatttcccgtttacggcgccggtctttggggtgctatctggggatatgttgcactgaatagcgacaaggataccgtttacggtgtttacttctcccatgccagtgagactccgggtctgggtgccgaaattgcaactccccagtttcagggtgaattcactggaaagaaaacattggagaacggcgaggtggccctcggtgttgtgaagaacggcaaggtagagaaacctgactatcaggtggacggcatttccggtggtaccatcacttctgttggtgtggatgctatgttgaaggcttgtctgagcagctacaagaactttttaactaataataatgaggaggaataagaatatgggacaattgttttcaaagaagaataaagaaatattctctactccgctgggactgaacaatcctgttaccgtgcaggtattgggtatctgttctgctttggctgttactgccaagctggagcccgccattgtgatgggtctttcagtgacggtgattacggcattctccaatgtagtgatttcactgctgcgtaagacgatacccaaccgtatccgtatcatcgttcagctggtggttgttgccgcgttggtaactattgtaagtgagattctgaaagcttttgcttacgatgtaagtgtgcagctttctgtatatgtaggtctgattattaccaactgtatcctgatggggcgcttggaagcatttgccatgcagaacggtccctgggagtctttccttgacggtgtgggtaatggtttgggatatgccaagattctggtaatcgtagctttcttccgcgagcttctgggttcgggaacgttgctcggtttcaacatcttgaactatgaacctctgcagaagttgggctatgtgaacaacggcttgatgctgatgccgccaatggcattgattctttgcgcttgcatcatctggtatcagcgtgcacgtcacaaagaattgcaggaaaagcagtaataaataaatgaagaatgaaaaatgaaagaatgaaaaatgggctgctctgctgcagtacaagttctcattgctttaattctttaattctttaattcttaatttatcgaagagatatggaacatttaataagtttattcgtccgctctatctttgtggacaacatgatattcgcgttcttcctcggtatgtgttcttaccttgccgtatcgaagaatgtgaagactgccgtgggactgggtatcgccgtaactttcgtgttggtagttacgcttccggtcaactatttattgcagacaaaggtgctggctgccaacgcaatcattgaaggcgttgacctcagcttcctgagctttattcttttcattgctgtaatcgcagctatcgttcagttggtggaaatgattgtagagcgtttcagcccttcgctgtatgcttcactcggtatcttcctgccgttgattgctgtaaactgtgccatcatgggtgcttctcttttcatgcagcagcgcatcacactgggtgagagcgacccgaaattcatcggtggcattgctgatgctgtctcttatgcgttgggctccggtatcggttggttgctggctatcgtaggcttggctgccatccgtgaaaaaatggcctattctgacgttccggctccactgaaaggactgggcatcacgtttatcactgtaggtctgatggcaatggcatttatgtgtttctctggtttgaacatctaaaagaaaggaataaaacaatggatatgaatatgatattagcaagcattggagtattcctcgtggttgtcatcctgcttgttgttatcctgctggttgccaagaatttcttggtgccttcgggtaatgtaaaactgactatcaatggtgataaggaactggacgtagcttccggttctacattgctgaatacgctgtctgtaaacggtgtgttcctttcctccgcttgcggtggtaaaggttcctgcggacagtgcaaatgccaggtaatggaaggtgggggtgaaatcttgccttctgagactccgcacttcagccgtaagcaaatacaagatcactggcgtctgggttgccaggtgaaggtaaaaggcgatatggctatcaaggttcccgaaagcgtactgggcgtaaaagagtgggagtgcgaggttatctccaacaagaatgtggctacgttcatcaaagagttcatcgttgctttgcccaaaggcgagcacatggatttcgttccgggttcttatgcgcagattaagattcctaaatattcgatggattatgataaggacatcgataaggaacttatcggtaaggaatacttgcctgcatgggagaaattcggtctgttgggcttgaagtgccgcaatgacgaagaaaccatccgtgcttactccatggccaactatcctgccgaaggcgaccgcatcatgctgacggtacgtatcgctacgcctccgtttaagccgaaagaccagggaccgggcttcatggatgtaatgccgggtatcgcttcttcttatatctttaccctgaaaccgggtgataaggtaaccatgagtggtccttacggagacttccatccgatattcgactctaagaaggagatgatgtggatcggtggtggtgccggtatggctccgttgcgtgcacagattatgcatatgacgaagacactgcacactacagatcgcgtgatgaattacttctacggtgcacgtgcattgaatgaagtgttctatctggaagacttcctgcagattgaaaaggatttccccaacttcaagttccatcttgcactggaccgtcccgatccggcagccgatgcagcgggcgtgaagtacactccgggtttcgtacacaatgtaatttacgagacttatttgaaagaccacgaagctcccgaagacatcgaatactacatgtgcggtcccggcccgatgtcgaaggctgttgagaagatgctcgacgacctcggcgttccggctcagaacctgatgttcgataactttggcggataaccttccttatccgtcttgagataaaaaactccggcttggccttcagggtcttgccggagtttttttgttcgaggtattttcctctctaatgaaagaaagtggagtggattcttcgcagttttttcttttattccttgatatgaatcagtgcatttgccagaatggctgttactcctccggtggtaattcccgaagagaagatatttcttagtatttcgggaagttggcataatatttccggaaccagttctacgcttagtcccaaagagaaactgatagccatgactaatgttgccttacggttgatttcctgtgcggcgatgatgcgtatgcctgccgctgccactgttccgaacataagcagggtagcgccgcccaataccggttccggcatcaatgaaaataccaggcctacggcggggaaaagcccgagtattaccaggaatcctgctatatagtaacctacataacggcttgccactcccgtcagttgtatcatcccgttgttttgggcaaatacggagttgggaaaagagttgagcatacctgccagcatggagttgaagccgtcggcaaggataccgcccgaagcgcgttttacgaatgtttctccttccaccggttcgccggatatgagcgaattggctgtgatgtcaccgtatgcttcgatagcggtaatcatgaaaataagtcctaaggcaatgatggttgagatgctgaagtccaatccgtaacggaacggcatcgggagattgaaaccgccatagctttgtatggatgtaaaatctactatccccatgaaccatgccacgatatagcctataaccaatccgatgacaatggaactcatcctcatataccggttggaactacggttgaaggcaatgatgagtagcaacaccagggccgccagtcccacatggcgcagactgccgaaactaccgtctgcttgcgctgccgcaccgcctccgcaagcagtaattcccacttttatcagactcattccaatgagagtgacaacgattcccgaaatgaggggcgtaatgattctcttggtatatttcaaaattcggctgatgaacatttccacggtagatgctgcgatgcaagaaccgaagataagcggaagcccgcccatcgttccggcagcaataatgggtccgataaaggaaaaactggttccttggatgcatagcagccccgtacccaatcctccgaacctgcggcactggatgaacgttgaaatgcccgaagcgaacaatgccatggataccagataaccggtggtctcggcatcgagtttcagtgctccggcaataatgaggggaggtgtgatgatggcaacgaatatggcaagcagatgttgcagggcggcgaagaatgcttccttgaaaggtggcttgtcattcagtccgtatatcagtccgttttttaacttttctccttcttgattgtcctccatgtgtgcagcggtttatctgattttaatctcacaattgtccagactctcgatgatggcaagtgattccacatggatgccttgttcgcgcaattcgtcgccaccatgctggaaagccttctcgatgatgaatcccataccggccagttcggcacctgcctgcttcacaaggtcaatcatgcctttggctgcattgccattggccagaaagtcgtcaatgaacagtaccttgtcacccggacaaaggaagtccttgctgacacagacctcgtacgaacggttcttggtgaaggaaaatacggtggtggtcagcatgttttccatggtactcggtttcttcttcttggcaaatactacgggcagttccagcagataacctaccatgatggcaggggcaattccgctcgcctctactgtaatgaccttgttgatggaggtggaagcgaaccgtctgacaaattccacgccgatggatttcatcaggatggggtccatttggtgattaatgaagttgtctactttcagaatgcctccggggaagcattttccgtctttgagaatgcggtctttcagagttttcatgttggatgatgttttattgaatgttatcgttttcctcttctgtttcttcttgaatggtatctttgggcagcaatcttggagaaatgcgtttcttgggagtgaggctcatgcctttcagcatttcggcctggcgcactacgctgccgttaccgtccgagagctggttgaaggctttgtcgtaatccctttgcaggctggccagtcggtcgccgataccgaggaaggtgtcggtaaagcctgcaatcttttcatataagatggtgccgcgcttgatgatggcctgcacattctttacctggttctccttcttccaaaggtcgagcgagaggcgcagggcgctaatcaggttggtggggctcatcagtaccacctttttgttgtaggcatattcccagaggtgggtatcgctttggatggcgaggaggtaggcaccttcggtggggatgaacatcatgacgaaatccggcgattgggcgtcataatgcgagtagtctttatggctgagctcgtcgatgtgggcgcggacggattgcaggtgtgctttcaggaagtgtgcctgctcctccttgttttcggcagaggtgtaggcagcataggcagtcagcgacactttggagtcgataatcatttcccgttcgtcggggtatttcacgatgatgtcgggctgcatcttctgcccgctttcctcgttgatgatggcttcgccccgttcgtcttttagaaactcctggcggaagtagtgttcgccttcaatcagtccggaggcttgcaacagacgttccagaatcatttcgccccagttgccttgcatcttggagtctcctttcaaggcacgagtcaggttgttggcatcttcgctgaggcggttgttcagctccaccagttccttgatgcgttcacccagcgagaaacgttctttggcttcggtgctgtatacttgttccaccttttggcggaagtccttcaggttatcgcccagcggacggagcagattgcccaggtgttcggcattcagcctggtaaagtcttcggctttgctctggaagatacggttggagagattctcgaactcggtgttcatgcgcttgtgcaacgcttcggcttcttccttctgcagcttcaataattctatttccttctttgtcccgctgatttccgccctcagtgcggctgacttgcggtctgccgccagatagccgactacggttccaatgattatccctataatcagtaataatatttccatagatgttttgaagtgtccgccttattgtgtcaatatttcgtttccgtcttcagtaatcaggatttggctttcccattgggcagaaggcagtccgtcgtctgtgcagacggtccatccgtcggcttcgtcgataaagacttcgtagcttcccatgttaatcatcggctcgatggtgaacgtcatgcccggcactatcagcatgcccgtaccacgtttgccgaagtgttccacatccggttcttcgtggaacttgacgccgcagccatgtccgcagaggtcgcgtaccacgctgtatccgttcttttccgcatgctcctggatggcggcgcctacgtcaccgaggcgtgcccagggctgtgcggtctgtatgcctatgtcacggcattctttggtgacctgtaccagtctctgcatgtcggggctgacttcgccaatcatgaacatgcgtgatgcgtcggcaaagtaacctttgtaaatggtggatacatcgacatttacaatgtcaccgcttttcaggaattccctggtgctgggaatgccgtggcacactacatcgttgatgctggtacacacacttttggggaagccttcgtacatgaagggggcggggatggcgtcgtggtctgtggtgaagcaatacaccatatggtcaatttcagctgtggacatgccttcgcgaatgttctcggagagataatccagcagggccgtgttgattttggcgcttgcgcggataccggccaactgctcctcggtgcggagtgcgcttcgcatcggcagtttatatccttctttcttataatgttgaattttggcttctacttcgtcggaatagtttttaggagtaaaccggactcctttcatgaactttttcattgtcttttcttttttatgagactgcaaaaatacacaataatgcaggtgcttgtactatcaagagccgaaaaaacattcgttttctttatcccgataccagcttagagggtattcaccacttctatttcgcttcttgaactgtctatcctccgtacttgtatctgggtctttatgcgctctttcagtccttccacatgactgatgatgcctaccttcttgccgcccatctggtgcagtttttccaatgtgtccataacggtgttcaggtagtcgctgctcagtgtgccgaaaccttcgtcgatgaacagtgtgtctaccgagaggctctggcggctgagggaagaaagtccgagggcaagtgacagagatactaggaagctttcgccgcccgataaggtgcatgccggacgtgccgcacctccttgatggaagtcgcgcagcaggatggtgagcgaaccggcctggcattccagttcgtagcggtcggtcaagcgttgcagatagaaattggcgcctgccagcagttcttttaagacgaagctctgggctatgttgcggaagttctttccccgttcgtcaccgaagtggtggcagaggcggtcccacttcagatactcttcgcgtagccggtcggcacgttccttttcttcctttatccggtcgatgttacgggtgttttcttccaggcgtaacttctgctggccgatggattggttgccgacggttatcttttcttcgagattcgcgatgagtgcatccagggtttcgaggttctcgttttcttctatttcgggcttccggccgatgtgctcttccacttgtccggtggccagatgaaaggcggtcgatgcagctacttcttcctctttaagtgtctgcaatgaggcacgcaatgcttctatccgggagccggaccaagcggataggacggtgatacgctcctcgtcgagagtggggttggcggcatagaacccggttaaatccttttgcagccttgccatttgttctgcggtggaggatatgctttgtttcagtccgcttgcttgtgtattcagattattccaggcaatccccaggtccttgatttccatttcctgtgttgctgcaggtgcgttgcgccagtcggggaatgcggcatcgatgctttccttgttgatgtttatcccttccagctctttgtggataagggcaatggcggatttcagttctctttgtttttcctgcgccagccggtagttgcgcgtagcttgcgttaggcggtcaataaaggagaggggggagttctcccattccgtgttccatccttcccagaggatgtggggagtgacgcggtccatggtggcacgtatgttctccttttcgttggcggtgagcgactcgtaattgacgatgttgtttttcagctcattcagcactctgtcggcagagttgaaggcttggcgtgcagcgtccacatgtttttggcattcgtccttttgccgttgcagagttatgatttgtgcgctgagcttttgaacttcagtgagcttttcgttcagtttgtctgcttccagcttgttctcttccagtagcttcttcagggtttcgtcggtggttgtggagaggccgatgccgttgcattgggcgcatttggcttgtgcgtcagtacgggcaaggttgtagctccggagcgctcttgctgtggactgacgggcattctctgccagcgttccgtaggtcttggattctgtccgattgttgttcaatgcctgctcggcttccttgtattctttctcttttgttttcagggaggtgcgtatgggagcaaggacagactggaaatcttcatctttgcaaagcgattttatttcttgtccgcacacggggcaagtatccccgacgacaagccgggagcgtgtttcctttgcccactcttctacggcttccttttgcttgtcgtagagggtgcggatgtcatcataacttgttttcctgctgtcgaatgccgtttgcaggaggacgtattgcttttggcacgcctccactttggcgttcaaagccttttcgttttccttcgcctcgttcagtgtcctttccgtttcagccagtaaagacaaggcgctcaaggcttgtagcaggttctcccgtccggcatcgagtttgtttttcttgtcttgcagggcagggcggtccatggtttcaagctgcttgttccggaggtttatttcgttttgcaatgtatggttctcttgttctttccgggtgagggcagcttccttgtcggtacgctccttgacttttacgggttgttgcgcggcaagtctttcaaggtgcgcgttgtaggtgtcgatgcgtgtttgggcatcgagtgcggattttaggccggtaatgatggattggctttgctcgaacatgggcagtaagggcgaatgcttttgcaagtacttctcggcacgatgcagcttgtcttcttgctctttcaggaaaccgcatagccacttgcttcctccgtccagccgggtaaaggatgctcttaacattccggcttgtgcatagttctgttgttgttgctgttgctgctgtttcaaggtagagagccagttgcgggcatcggcggtggcgttccattccttaatcagcagttctttctgtttgaattcgtccgattgcagttgcgcttgcttcccttcccacatcttcttttgctgttcacgggtgaggaggagttcggagtatttcttcagccagtccctttttgcgagggcgatggttttctgctcattggcttccttgactccggcattttgcgtggctatggcttccttgattgtggcgacttcttcttctgccaggatgtggatgccttccagcttccggttctggttttcgtattccgtccgtctttccttggtggcggcatatatttcggcacctatttcggagtagatacttgtaccggtcagcttttccagaatatccgatttttcgctttccttgctttgcaggaacttggtgaagtcgccttgtgccagcatggtggtgcggcagaattgttcgaaggtcaaccccactgcagcttgtatttccgtctttatctcattctttttgttgagctgtatgccgcttttattgttttccagtgtccagcgcacatcctgcacggctcctgaaatcttgcggtgtgcccgcgccacgtaccatcgggcggtgtagggtatttcgtttgagccggtaaactccagctccgtccatgcttcactggtgttacggcgcatcagttgccggctgtcgttgatggcaacatcttcctttttggcagagaaagtctggctcaggtctttgtatttttcgttctcggcatggtccatgcggggcgtttcgttgtagagtgccaggcagatggcgtcgagaatggttgtcttccctgcacccgtttcgccgcagataaggaaaagggattcctcgcttagcggtccgttctcaaagtcgatgacggcatcttctatggaggcaaggttctttatggtcagtttctggagtttcatggttcggacaaatgattaggagttgttcttgcttttcactttttgcatgacagtctccatcagctggcaaagttctgggtccatctcttctccttcggtttcgcggtagtagagtctggctatttccaggggagacatttcctgcatctcttggatggagatatgcttgctctcgtcagtgtcggcctgccgctttcgggtagtcttgatgtagcaatatttgcatgccttgcctttggcggcgttcgaggctttttcgttgcagtcgggtggcaggtagccgtttgtcagcacgttcagacggaggtatgcaggtttctcttccggatattcttccagcagtttcaaggcgtcctcgaaaggtgtcgggtcatggggaagtgtgacgagcggaatcggattttcaatttcccttgtactgatttgtggctctgcccctttctccaactcgatgatggagacggagtgcggataggtttcgtcgaagctgacggagaggggagtgccgcaatagcgtgcgtggtgatgactgcctttgatgtcctgagggcaatggatgtgtccgagtgccaggtagtcgtacccttctcccatagcgctgaggggaacatactctattccgccgatactctcatcgtgcccgctacggtcgctgccttcaatagagagatgggccatgaggacgacgggaagctgtgccgtattccgtttcttcacttcgtccagcagtgcctggaagaagcgtgcctgccgttggtcgcgcggtgtttcagtgtccagcagggggaagttttgcggatagacgtggggcacggcaatgacgtagcctattgcctttttttcattgtttatctcgatgatgtgcttgtccagattcacttcctcggctgtacgttcgatgtttcccacaacgttcaagccgaagtgctgccagaggttgctgtctatctccaatttggagctgctgtcgtggtttccggcggtgactacgatggccattccggggcaggcttgatggatgttcagcatggcgtcggtgtacatcttctgcgtggcggcagcgggagaggagtagtggtagatatctccgcttaccaccatggcgtcgggctgctcttcggttactatgcgggtgagttgccgtaggaaggattgctgctcggcggtgcggtcgtagttgtagagggtgtgtcccagatgccagtcgctggtatgtagtattttcattgtttttgttacttcaatggatgtgggttatggtttccttagaatataaatcttgtgtgttcctcgtcctttgtagtcgatgcccgattcgggattggctatccattcgcgcaactcgcgggaggcggcagacttcaataagccggtcagttggcaatagtcggcttgggtcatgaagctgttcttttccaggtatttttttgcccgttccagccgttcctgcggagaaaacacttgtgaggagcgttggaatttgtcggtggaacgtttcaggtggcaatggcgagcggtacggtacagtagttccttgtccaccttgaaatgtatgtccttcaggcagatgctgacggcgtttcgcttgatgtctccttcttcgcccgtctcccgttcacggtcttgccgcagaccgagggcaggggtgaatactcctaagttgtcaatcttcacggagtaaccttgccccatttggtaggctatttcgtcggtgatggcttgcatcagtccgatgatgtctcctcgtgtgaaggatgaggcgtatgctatcttttcggtgatggtttccaagttcacctgcccgtatagtttcattcgtgggtagaggatgcgtttgccgtcttctcccggcaggttcagttcctgcatgttgtattctgccatgatggtagcgttgttatgaggttcgtttgtttattggggcttacagagtttgtcccaaggttgcggatgtgtatgccaaggttggggatttctatcccaaggcttgggatagacaaaccaagggcgaaggtaattctttatctctatacttgcaaactttactattagtagttaggaagttttttattggtagtcgggaagttttttgttataggtttgagagaggaattgaaaaaaacgttatctttgttacataagagaagtgcatgaatgatgaacaaaactaaaattaagcgatatatgaaacattatccggacttattattgttgtttaccttattgtccgttaccacaatgattaaagcacaaatatcgataagaccttatagcgaatgggaagcaacccagtttgttgcagtgaacggacatcagcccgaagactatgtaacgccagataataattgggaaatactatacaatttacggactccacgtactcaagccgaacttcgtgaaatgggtattaaatgctctgatagccaattattgttattggaagtaggtggacttgtcagtaaaacaaaagagaaatgggaaactactatacccattctcgacaaagaacagaccaattctctaagaagcttaagtaaggagattgctgaatccatgtatgtcaaaacaaaggcagactttatatcattggcacaaactatcagtgaaatgggattcaagaacaatgtactctcacttgttttttcataccttctggatggaaaaatgtggacaaagttagtcttgtttgaggatgttgacaattatacaagctggagtggctgttactgggtattatacgaatcaagaaatggctttgcatgcggtacgaatggtttcggagaacagaatttgattttgacttacatcaatagcggcattgctcctgacaacgacattatggaccattgtgctgatgaaatagcacaatttggaaaagtaacagatgccaaactcgtttctcagttaaaaccttatgggctggtagatgataatggagatgtattatttcctattataaagaaacggcaagaccgctttcatcaaataactgaaaaattggtaaactctatcagtgcggaactaaagaataattgtggctccttagcaagccaatatggtattgacaatgaaaaagtggcaatggtgatgctgtaccatgaagtcatgtgggatttggtagataatctgattcaagataggataatcttcactccagctatttttaaagatgaagaatcgaataaagaacgattgaatgaagtcgttttcttcatagaaggaggattaatgcaataataattcgatagaggaaaggacatttgactttgaagagttttctgtaaatgtatttcaagtgcatagaaaatagccaattaaaaataaagaattatgtacgaatgggtcaatgaaatgaactgtgccgtaactgtatgcgacacaaagggaatcatcctatatatgaacgagaaagcatgccgtacgtttgccaaacacggtgacttgataggcaagaatctctttgattgccacaacccgcaatcgcaagccaagatacgcgaactgctggaaacgggggagtgaatgcctacaccattgagaagaacggcgttaagaaaatgatttatcagacagcatggaagcaggacggagtggtcggtggtttggtggagatttcgatggaaatacccggagagatgccacactatatgagaaaataacaaaatgatatatgatatgaaaacactttctaattcagaactgacaattaaagtctccccgcatggggccgagttatgcagtatcttgcgtgatggaaaagaatatctttggcaggcagaccctgctttctggaaacggcattctccggtgctttttcccattgtaggcagcgtttgggagaatgaataccgccacgaaggtgtttcctatgcattgacgcaacacggttttgcccgcgatatggattttgaattgatatttgaacaggaagatgaggtacgctatcgactggttgacagtgaggaaacacgcaagaaatatcctttcccgttttgccttgagataggctatcggatagaggaaaagaagattgaggtgctttggaaagtcatcaataccggaacatgcgaaatgcacttccagataggagcccatccggctttctattacccggactatgatacggagacaacggaccgtggatatttcggctttgataagacggaaggtttgcactatatccttatctccgagaaaggatgtgccgctccggataaggaatatttgcttgagttgacagatggcctgctgcctttggacatccactcctttgataaagatgccctgattctggaaaacagtcaagtgaaagaagttacattatataataaggagaagaaaccctatctcagtctgtatttcgacactccggtggtggggttgtggtcgcctccggccaagaatgctccgtttgtctgcatcgagccgtggtacgggcgttgtgaccgtgctcattataaggatgaatataaggataaggactggatgcagcacttggcgccgggagaagtctttaatggtgggtatacaattgatataagataaaaaatgaagaaggatactgaaaataattcggtatcctttttatttggagaatgcaatgtcattatctttgcgcccggtaaaaaatataggttgttttttaaggtatgaagaagagtcttattgcattggcgttcggtacattggggctggggattgccgaatttacgatgatgggtattttgccctatgtggctactgatttgggaatcagcattcccgtggccggtcatttcatttctgcgtatgcgttgggtgtttgttttggtgcgcccatgctgctcctggcccgtaaacgcccgttgaagcagattctgctggtcttgatggcattaatgattgtgggtaatatttgtgcgtctatggcacccaattattgggtcttgctgttgggacgttttgtttccgggcttcctcatggcgcttattttggggtggcttccattgttgcgggaaaattggctgataaggggaaaagctcggaggcggtttcaattatgatagcgggaatgactgtggccaatctgtttggggtgccgttggggacttcgttgagccatacactgtcttggcgtgccacgtttctgctggtaggtgcctggggattgataacattgtactatatttggcgttgggtaccgcaggtcgaaggactgaaagatacgggatttaaaggacagttccgttttttgaagaagccggcgccgtggctcatattgggagctacggctttgggtaacggtggcgtattctgctggtatagctacatcaccccgttgctgactgaggtttccggttttagtgcggacagcattacggcactgatggtactggcaggattcggaatggttgtcggtaatctggtcagtgggcgcatgtccgaccggtacactccggggaaggtcggtacggtggtgcaagggatgatatgtgttattttattattgacatttttactttcgccccatccgtggtgttcggcgatattgatgacactctgtacggcaggtttgtttgccgtctccagtccggagcaggtgttgatgattcgtgtggcccctggaggagaaatgttgggaggcgcttgtgtgcagatggctttcaatttggggaatgctatcggagcctatatcggaggtcttgccttgagtggaggataccgttatcccgcattggcaggcgtaccgtttgcactgatgggatttattttattccttgtcttctacaagaaattccaggctaagtattaagtgtttcattttttttgtgtatgtttgtccacaagtattaactaaactcgataacttatgaagactttgaattatgtgaagatattgctgttgtgtgtatttacgattggactggcgtcttgtggggatgatgtgtattatactatgcagaatagtgacgacaaattgtgtgaaagaacatgggttgaagattacgaaagtgatggtgttgtgactggtgcgtatcaactaagattttataagaaagataacaaggggcaggaagtatccacaacttacactacggacggtaaagtgacttatgatcgggagtttaattggcgttggacagatgatagcaaagagactttgaagttgacttttgcagatggtaaagtgaaatactttgagaatgtatgggtgcgtgaccattatctttccggtaagatagaaggaaaagttgtgatgttgacagatgcaaattatataaataaatgaaggttatgaagtttttggtgcagttgttcttgctgtctgtcctatgtataggcttgtcttcttgtgaagacgatcaagatgtagtggattctactattatcggtcgttcatggacaggcgatgtaggcatgttggatgactttggtatgtcggtgattagtacattttctttcggggcagatggtttcggagaagaagttcaacgttatcgcaatggggaatattgtgattcattccgttttcaatggtggtgggaagatagttatagtagaaaccttgtattagattatggcagatatggtggcatttcttatatggatgatgtcagagtcagtggtaatcagctatggggtacattcttcttttcggatgattctccgggttttaatttcacattatatatggaataaaaaaataggattatttgtatgttccctatactcattgtatagggaacattttttataagaaatcttctacttattcttcaagaccagcttcttgaactctcccggataaggtgtttcaaaccgcatcagttctcccgtgacgggatgatagaaacagagtttgaaagcatgcagagccaagcgtccgataggatttacgtcttccagtccatagcgtccgtcgccgataatgggatgccccaaatcctgcatgtgtacacgtatctggttttttcgtcccgtttccaggttcagttcaacgagagagtatccattggctcgtttgatggtacggtaatgcgtaatggattcttgtcccccgtcatctgtcggacttgaatatacatacaacttgcggtccgtcaaccaagaaaccacggttcctgcatctttttccatctcgccgaccactacggctacgtatcgccggtctgttacaatgtcatgccagttatcgcgtagtgtacgttgggtcttctcgtctttggcaaacatcatcaagccggaggtgtcacggtccaggcggtgcacgatgtgtacacggtgctgcttgcccgagcgttgcacgtattcattcaagatggtataggcggtacgttccttttgccggtcagtgttgacggacagcaaaccctgcatcttctctatcacgatgatataggcatcttcgtatacaatcttcatcagtttatggttgaactctttacgtcccttctcacggctgatttgtactttcatacccggtttcaggggaaaattgtattgtgtagtgataacgctgtccacatatataatgcgtttgctcagcaatgatttcagcttggtgcggctggcatccggcattttagctgccagaaactccatgagctccatcggttccttcaccatgtagtccgtatattgtgcacgggcccttgctgtaattttttcttttgccacgactggtttttatttacgattagacaatttacaatttaggattgaaaacgacttggactttcaattttttaattccaataatactacgttttccacatggtgggtgtgcgggaacatatctaccggttgaacggcctttactttatatttcgcatcgagcagttgcaggtcgcgcgcctgcgtagccggattacaactgacatatacgatgcgtttgggctcggcaaacagaatgacatccactacatcctggtgcattccggcacggggagggtcggtgatgatgacatcgggacggccgtattggctgatgaagtcttgtgtcagcatgtctttcatgtctccggcaaagaacaatgtatttttgattccgttaatctcggcattgaccttggcgtcttcaatggcttcgggcacatattctatgccgattacctggcgtgcttgcttggatacgaaattggcaatggtgcccgtgccggtataaaggtcataaacaagctcgttaccggttagtccggcaaagttgcgcgctactttgtagaggttgtaggcttgcttggagttggtctgatagaaagatttgggacctaccttgaagcgcagtccctccatttcctcgaagatgtggtctttccctttgaaggtgtgtacctcgaggtcggtgatggtatcgttgcacttattattaataatgtataacagggaagtgatttcggggaatgtatctgctatgtattgcagcatttgcttgaacagagccatttcctcctctttctctatcttgcagatgaggattaccatcagttcgccggtggtagaggtacgcacaatcatattgcgtagcattccttcgtgcgtgcgcaggttgataaaggaatagttgtgctggtaggcatagtcgcgtactgcattgcggatgcggttggatatatcgtcctgcagccagcacttctctatggcaagcactttatcgaaagcattgggaatatggaagcctacggcattcatctgttcgtacactacattctgctgaatctcttctgtcgtcagccaacgtttgttggaaaaagtgtactccagtttattccggtagaactgagttttttctgaacctaatatcggagaaatttccggtaattctattttgccgatgcgggtgaggttgtccgttacttgtttttgcttatacttgatttgctcggaataggggagaacctgccatttacaaccgccgcatacaccataatgttggcagaatggaactgcccgtactgccgaatattcatggaatttcacagcttcggcttcagcataatgatgcttttttctcttaatttgcaggtcaactacatcgccggggacgacatatggtacgaaaatcaccaaatcattgacttttgcgatggcttttccttcggcagccacatccgtaattgtcaccttctccagtaggggaagttcttttctctttcttgccacttttacaccaatctaataaattcttcggcaaaaatagacattttttcgggatttctctctatgaaatgaaatattaaagattgcaatgtcgaaattgcattttagcataaagttttttctgaaaaagttttctagtctgcgaaatatacttagatttgcgaacagaaaagagaaaatcactatcaaaaactttaaatttatattatggacaaaaaaagagtttatacctttggtaacggtcaggcagaaggaaaggccgatatgagaaaccttttgggtgggaaaggtgccaaccttgcagaaatgaaccttataggagttccggttcctccgggctttacaataacgacagaagtttgtacggaatattatgaaatggggcaggataaagtcgttgctctgttgaagaacgaagttgaacaagccatcgctcatgtggaaacactgatgcgttccaaattcggtgatgtggagaatccgttgctggtttccgttcgttcgggtgcacgcgcttccatgccgggcatgatggacactatcctgaatcttggcttgaatgacgaagtggtggaaggcttgacgcgcaagacgggcaatgcacgctttgcatgggactcttaccgtcgtttcgtgcagatgtatggcgacgtggtgctgggtatgaagccggtgaacaaggaagatgtagacccgttcgaggctattatagaagatgtgaaacatgctaaaggcgtgaagctggacaacgagcttgaggtggaagaccttaaggaactcgtgaagaagttcaaggctgccgtaaaagaacaaacagggaaagacttcccgacttgtgcttacgagcagttgtggggtgccgtttgtgccgtattcaactcttggatgaacgaacgcgccatcttgtatcgtaagatggaaggaattcctgacgaatggggtactgccgtaagcgttcaggctatggtattcggtaatatgggcgagagctctgccacgggtgtttgctttagccgagatgctgctaccggtgaagaccttttcaacggtgagtatttgattaatgcacaaggcgaagacgtggttgccggtatccgtactccgcaacagattacaaaaatcggttctcaacgttgggctgaattggccggtgtaagcgaagaagaacgtgtcagcaaatatccttccatggaggaggctatgccggaaatctataaggagttggatgctttgcagacgaagctcgaaaatcactaccgtgatatgcaggatatggagttcactgtacaagagggtaaactctggttcctccagacccgtaacggtaagcgtaccggagccgctatggtgaagattgccatggatttgctccatcaaggtatgattgacgaaaagactgcattgatgcgttgtgagcccaataagttggacgaactgctccacccggtatttgacaagacagctctgaagcaagccaaggtattgacccgtggtcttcccgcttctccgggtgccgctacgggacaaatcgtattctttgccgatgatgctgccgaatggcatgctgccggcaagcgtgtggtgatggtacgtattgagacttctccggaagatttggcaggtatgacagttgccgaaggtatcctgactgcccgcggcggtatgacttctcatgcggcagtggttgctcgtggtatgggtaagtgctgtgtatccggtgccggtgccttgaacatagactacaaggcgcgtacagtggaagtggatggtgtactgttgaaagaaggtgactatatctccttgaacggaagcactggtgaagtatataaagacaaggtggaaacaaaagcggctgagctgtccggtgactttgcggaactgatggatttggcagacaaatatacgaagctgcaggttcgtaccaatgcggatactcctcatgatgcagaagtggcacgcaattttggtgcggtgggtatcggcctttgccgtacggagcacatgttcttcgaaggcgagaagattaaagccatgcgcgagatgattctggcagaaaacgccgaaggacgtcgcaaggctttggctaagattctaccttaccagcaagctgacttcaagggtatcttcaaggcaatggctggttgtccggtgactgtacgtctgctcgaccctcctttgcatgagtttgttccccatgacctgaagggacagcaggaaatggcagatacgatgggtgtaagcctccagtatatccagcaacgtgttgaggcgctttgtgagcataatccgatgttgggtcatcgtggttgccgtttgggaaatacatatcctgaaattacgcagatgcagacgcgtgctatcctgggcgctgctttggaattgaagaaggaaggcgttgaaacccatcctgaaatcatggtgcctctgaccggcatcttgtatgagttcaagcagcaggaagaagtgattcgtgctgaggctgcccagttgtttgaagaagtgggtgacagcatcgacttcaaagtaggtacaatgattgagattccgcgtgccgccttgactgccgaccgcattgcttcctctgccgagttcttctcatttggtacgaacgacttgactcagatgacatttggttattcacgcgacgatatcgcttccttcctcccgatttatctggagaagaagattctgaaagtagacccgttccaggtactcgaccagaatggtgtaggacagttggtgcgtatggctactgaaaagggacgtgctatccgtccggacttgaagtgcggtatttgcggcgagcatggaggtgaaccttcttctgtgaagttctgccatagagtcggcttgaattatgtcagctgttctccgttccgtgtgcccattgcacgtctggctgcggcacaggcggctgttgaggaataattccaaattggcttaattaaaataataggctgtaactcattgaaatacatgagttacagcctatgttgttcttatacggttcgtacacttgacaatggaaaccgcgccaaatgtacgtactcgcttactcactgcttacactaaaactgatgttgcttacacctgcttacaccatcaaaaaagcctatggcagcgtaaaattaaaagcttatgacaactacattaaaagcaatcgtaaggaagctgagaacagacggcctttatgcagtgtacactcgcatcgtacacaacagaaaaccgggttacatcaagaccaacaagattgttgatgcgaattatatctctaaagagaatgaaccgaccgaccctgtcgttaatgagtattgctcaatgctcgttcgacaatatacagaccgactgaacagaaccaacactgcccatagcacagaacgttagaactctttaaatgttaattttcagtgctttcaactcatggttttgggagattttgtttcgtgagaatgcgctatattcattacgattggagatgaatgtttattattacatttgtgagcgaatgggctaaaaaactcgccttggtcttgtggggttccacttgaccaaggcgagttacttatgctattaaagttcatcttctgcctggatgcgctgtttccaaagttttaattcattacgcattgcatttctaatctctttcaaaggtttgtttggaaactcatgaatgataagattatgaagaaagagaaatacggatatgaaatatttgctcaccaaccaatcagtagccgatggatgtaaaatgcttattgctggaatgccaaaaaatgtgccaacttcccatttcaagttatcaaagacttgaacagattggatagcatctgactcagactcatccatattctttctgagcgtatcaaaagcatttgtttccatgaaaacaatcctttttggtttgagtatgtttattagctctatagtgcttttaataccttcagccaacagctctttcttcaagttacttacacctttagatgactcaaacggagaaagatttgtccataccaccttcttgtcatcatcaatctggctgtccgggtatttggaaccatacccaaggaacaatcgtccgttggcaagaaaacgggaatctttcaattccttgtcgaaccgcttgctccaccattctttgtttccctccaagtaaccatcaactgtatgggtagaggtacatttcccgtttcctttgggatttattcctactaccatcagttcaatgtcagtttcaattacgttgagaggtgattgggtataatacggagtgttatacttctgtgagagttcattaaatttcggtatccacagttcactccattctttcagtaattcttgtttggtcttttccattgtatcaagtttttaatcggtttcgtacattttccataagtcttttgtccacttgtgcattgggcggtggcataagtgccaagcaaccaccgattcagcgttccgttcttcaaactctccggattggcaatgtaatagcgaaagctatccttccagttgcattcaatcagcactcctaacgacataaggatgttgcctttccaccggtcaaaggtctgtctggggattggtttgccattactggatcttcattgaggagccatttctcgttgagctccttcaaagaaagtcccttctctccagcgtgggaaagcgtattgaccacccaaatgtatttttccaggaaagtcatcttccttctgttttacgcagtccacttccgtatttcgcttcaaactcagtaaccagtttctggaagttctcgggcagataggtcatcgctttttcacacatgttcgcaggcaccccataaagagcttcagcaatggaaccggtgatgcagccgatggtatcggaatcgccaccgatactgatggcattacggacagcatcttcaaaatccgtagcctgcagcgcacattgaatggcttgcggaacgctgtcctgacagatgccgccattgccttccccatcaactccattccaggaataacgtttttgcagttcggcaatggtgagcgggaaacgatagccgaattcctgctccatacattgctgaatctcatctttcgatgctcccttacgggccaggaagatacacatggctgtagcctgtgcacccttgatgccctccggatggttatgcgttccttccgctgaaaccttggcggcattcatggtgtcatttttcgtatcgaatgcccaacccaccggacctacacgcatggccgatccgttgccgcagctgttgtatgccggagcatatccggttcttgtcttctggatgacccaattctggaaacagtttccatatcctcccatcggagagggataagcttccgcataccggacatagtaatccgccaccagtgaaaggcgtccggccagaatcgcatccgctgtagccaacgtcaggatgctgtcgtctgtgtattccacgtagcgaccgaagaactcaaagtccttggttcgtatgttactgaactcgtagatactgcctacgatgtccccaatgatacttccaatcatattcttcctgttttagtgattctacttactcaaagctgttgccaccagtaatgtccgtaaatatactcattttgtatctcatacagagccaaccgatggactttaatgcaaagttaccacgatactccctcaaaaagtgagacactctctatgttttaggtcataagtaccatgatatttgctgttgatacttttatacggccgcatttccatacgcttccacacttctttttcacttctgttctgagtccatacgcagtaatgcccttttgcccttgaagtcattgtctatagaacattgaagtatgtatagcctttgcaaccttggaatatgggacggatgaaccattagttcaaggcaatagcccagcttggcaacaagtgatttctatacagacgtatgccgttccaaagatgcagaaaactacggataaagaaatttggaacacttgataatcaggctaatattaccgaatatttttcccaagaatgatgttgtgaatttttgcgtttcgccgttttttgtgcttctttgaggtctctaaagctaccgggaagacatcgaactgcgttgtaggatttgtcaagcaagttgtactcttgtcattacaaaacggagttttgtcctcacaagagtcacttgccgattactgccgcaacggagcgataaatcgctgtttcgctatgcgaaataggtgtccagagaacccagctaacaagtaatcaaaggaagtatgaaacagaaaaccaaagtattccagttacggcttatcccgaggaagcccaactgttgaaggaaaaatcaggctcattccactctgtgagccactatatcctgtctgcagtgcaggaatttttcaatgtggatgtgaaggaacgcatcgagttgatccgagaactcggagaattttaccgaaagaatcagaacgaactgtcctgggcaggcggaaacctaaatcaggtggtcaaacgagccaatgagctggcggtagcctggttactcgcacccagctatagccaagagattgtgcttccaaccattcgggaaacacaggaaacgatgaaccgcatcaaacgggatttggaattgattacactcaagtgtataaaaaacaaaacactgaagtaatgtttgtgcggtatatactttaaccgttgaacccaactaatccgaatattcagatgattgcaaccattttacccggaagttcgaacttccatgccgtagattataatgaacggaaggtggcgaaaggtgtagcccggttactggagataaaaaacttcggagcactcggtgaagtgcgcaagccaacccctgaagagctggctcagtttctcatggaatattcctccatgaatcccagaatccagaaagcccagttccatgcagccatctcctgcaagggctacgagatgtcagaagcccagttgcttgatttcgcgcaccagtatcttcaagaaatgggctatgccgaacccggacaaccctggctcatttattcccacaacgatacagacaatgcacacctacacattgttacttcgagagtggcgcccaacggtcgcaagatacagcataaccatgaatgcagacgctcattgacaagatactcggtatggaccggcagcagaaaacagacaaggacatcgaggccgtcaaacagtacagcttttcttccttcacccagttcaaggccgtgataggaaccatgggctatgaagtctttcagaaagacgggaacgtcttcgtcaagcaaggaggcagaatccaaaagaaaattcctctggcagagattgaagccctgttcaagaaaggctatcaggataaggcacgcaatcgccagttgagagcctacctgaagaaataccgggatgtatgcgccaacaaggaagaactgcagaaggaaataaagaagaacttcggagtggatgtggttttcttcggcaagaaagacaagccctacggctatatgctgatagaccatgccaacaagaccgtcattcatggtgcccgggtccttgccgtagaagaactgctcgactttgctaccccgaacaacgctttgaccggatagaagcattcatagaccagttgctgaccctcaatcctaaggccacgcagggagaaatcttccagaaattcaagaaacagcatgcctatataaagaaaggtgtcatctactacgatggccagagcagacccttgccgcctttcatggccaaggccatagaccgtaataatcgcatcagtttcattgagaaattccgcctgcagaacgaagccgaagtggaaatgctgtgcaaggcattcaaggtggaccgtccggacctggtggacatttctacagaacgtcctcccaagtatgctgatgctgtggacaaattgcgtgatatattccagaatcccgaagtgaagtcccccccgcagcgctatgtatcaagaaggttttgatgtggaacgggtgaagaagaagcccaagaagaatacactcaatccaatcaaaagtttacagcggaagtcccatcaaggattgggtaaactccggaaagaaggagtcggcagtcacagtgctaaccgcgaatgggaagttggcaagaaaacgaactacgacgaggtggacgacggacgctcgttgaagatttagtattgatgtttaatgatttaagttacaacagaaagtcaaatggggacttttagttgtaactttttgggctaatttttctcagattcccttgttccgaaatccattcaccccccggttttagcaaccgaaagcacattgatgttgtacatttaggttttccctgttccagcatttacttttgcttgcgaatttaataaacggaaaacaacatgatacagaccccggtcatagtcacctttgccaactacttagtggcaaaaggcgtccgggtggttatcatcgactgcgacttccaacacttgatcatgaaatgccgcaaggcagacatcaagaagtatgagaggaacaactaccctatgaagtctggtcatacgaacccaacaacaaagtggataggacctcgctggtggagaaactgcacaatgacccagagatagatgtggtactcatcgactcacctgaggaggatgtagacatatcggacgaagcacagtccttccgacctcataaggtgagcagggaggaaccgaagaaggaagaggaaaagaaagaggaatccgaagcacaatcggatgccgatgcttcacaggaagggaaagaagaatccgacgatgaaaaggagcaatcagacaactcagaagaaacatccaatgaaactgaattggacaccgaacaggacgaaacttcttctcaatcttcggatgatgaaacgaccgaggaacctgctaaagaagcagagtctgaaaaaccttctgatgaacaagcatccgaagaaagcaacgatgatgcctatgatgaagaacactctgaaagtaacgaccaccccttctgctcaccgagctaccgcgaagccatcatgacggacggcatcctggtggatgacatcttcaaagtcatcgaccagttggctgaaaccggtgaatgtgacctgggcaccataatctatcactgcgaaagcatgcgatatggaggatgtaaattaaactgtgtcagcaaagaaaagaaataaaatattaactttgctaacactgttttttgtatgaaagaagaatttgattttgagagtatcaagaacaaggctattgaacagctgaaagcaggtaagcctttgttaggtaaagacggtgcttttgcccctttattggaaaacattctgaatgcagctctggagggtgagatggatgcatatcttacagaagaagaacgtcagatgggtaaccgccgtaacgggaaaatgcaaaagtaggtccagactccattgggtgaggtaaccgtatccactccccgtgaccgtaattcaagttttgatccacaatttattaagaagcgtgagaccattctggcagaagacgttgctgaccgtataattggcctgtatgctcttggcaacagcacacgtgagattagtgactggatggaagagaatcttggtaatcgtgtatcggcagatacaatcagttccattacagaccgtgtacttccggacataaaggcatggaaatcacgtatgcttgattctgtctatcctatagtctggatggatgccatccattataaagtaacggatgaacgtggttgtgctgttacacgtgcaatctataatgtgctgggtattgacagagaaggacataaggagctgctcggaatgtatatatcaagaaatgagggagcaaacttctggctcagtgttctgacagaccttcagaaccgtggagttgaagatattcttatagcctgtatagacggcttgagaggttttcctgaagcaatccaaagcgtttatcccaatgcagccgtacagctttgtgctgtacatcagattcgtaattccgtcaaacatgtaggctccaaaaatcaaaaggaattcctgaaggatttgaaatgcgtttatcaggctgtaaataaagaatcggcagaaaatgaacttcttaagctggaagaaaaatggggtgaacagtatcctatcgttatcgggtcctggcaagacaattgggataagctgtccgaatatttccagtacactccggctattcgtaagctcatatatacaacaaatactgttgaagggtatcaccgtcagatccgtaaggtaacaaaaaacaaaggcgtgttcccgtcggatacagcccttgaaaaactggtttatcttgcataccgtaatatacggaaggagtgaactatgccacttgccaattgggctacaatctcacagcaactggccataaagtttggagaacgatttaaattattgtaattttacgctcgtcgggacgggtggtcccgccccttggtgctggccgttccccgaccgatgagttttctaataggaaataatgcgtgacacagtttattttacactacccttatttcatcgttactattgattttatccattctctgaaaagtgctctcatctacctcgtactaatgcactaagcggctattgttatttatctttaaaaggccaatcatataaaacccattgttggtatagatttgtgtatgtctgataccaatcaacggttttataattgtaaattccgatagcgggttactttttacttacttctattgtaagtgtatctccctgcttgaaatcgttatacctttttcggaattttataggtgccccttcttccatacaatttattatttcatccaaattctctcctttaaatgttgctctatatgtatattgttttatatcaaggtctttcatgacaaatcggaccttatagacttgttctagtcgatcaagaatagtttctaaagaatcatctctaaatgcgatgatcccatctttccaggctatatatttaaatgtatcggtggaagttatttccatacgtttggtgtttcgctggtaggttaattgttgaccaggaagtaggtgttttgtttctttgccttgtgaaacagatactttcccagatattaatgtgattttttgctccatgctatgtgtaaaactagcaacgttaaaggccgtaccagtggctgtaatttccaattcatcagcttgaatgatgaaagggttatttttatcagcgtgtacttcaaagtatgcctcgccactcatgcatacccttcgtgtgttatttataaattgcgaagggtattccaatgtactaccagcatctaaccaaaccttcgagctgtccggcaaaataatttccgaaatagaaccgtaaggtgtactcgctttataataggtcagcgactcttctttcttattcatcattagggtgaacaaggttatcagaataggaaaaaagagaatagcagctattcgttgaaaatagagtactatttgtttgggtgtggaaacattcgtttttcctggttcgattcctgctttgacttttgttttgagtaatgccgactgtatgtcaatgttcatttgactagtggaaggatctgtcatttcccaaatatttctcattttttgaaaaaaaattctattttcttccgaaagactaatccattcttttagttcagttatttcctctagcgatgcctttgtttctaaatatctcagaataagttcagctattctatattgattctcttctctcatattttaatctcgtttcaaattatcaatatttcggtaaatttttaccgaaatattaaaagttaaataatagaaccggcaagagtcggttcgaaaacattaaagaggtcattgaaatgttgtcaaaaacgaatggttaagcatgaagaaatgtgctgaaaaaaagtgagctagcatgctgataacaaaggtaaaagtgctgcatgatttgttgattttttagtaaattaaaagttaactattcatctggttatggctaaagaaacactccttatgcaataccaatccgagtgcctgtcggctctcaaatcagtcgtgaatatacacaaaccttttgaaaaaacgttcatggacaccatgaaattattcatggccatcccggatcgtataaatttcctccaattgggcaggtatggatgtttttcggaacagacataccgtaaccttttggggaatgaaactttcgaccggtttgcgttcaacgcctctatcatcagcaagcatctcataggcaaaagaaaagccatcaccatcgatccttcctatatccccaagtccggtcataagacaccttggattggtcttctggtcaggctgtgccggggattataagcgaagattggaaatcatgggcatcggtgtcattgacatcgacaacgatgaatgcatgactttaggttccattcagacgtcggattgtaagaccttggataatatgggtaagaacctagttgactggtatagcaactatcttatcagtagaaaagacgagctacagagcatattcagaacggtggttgcagacgcattcttttccaaggaaacgttcataacgcctatgtgtgagagtgatttccatgtcatcagccgcttcaggaatgacgtagtcctgtactatccaacattggaaaagaaaacaggaaaacctggccatcccaagtggtttgacggcaggattgactttgccaatctagatctgacccggtgcaaggaatacgaggtgaacaagggaaagctgtacggattgagtgtatatgcaaaagctctcaaaaggtatgtttccttagccgtctgatatccgatggacgggaggacagacaagtggcagctttatttctctacagacgattccatggatggacgcgaagtcttggattattacagaaccaggttccagttggaattttgctttagagatggaaagcaacatgcaggaatcaccaactgtcagttaactgacttcagaaagttgaattttcacttcaatgcatcgcttgcagctgtcaacttggccaaagcggcatgtaagaggctcggaatagcctattccatatcctcttgcaagtcattcatacacaatgcttatatgcttgaacgatttatttgcgtgtttgggattaacccagacatgcaagttattgacaaacttttcaaagaactcattttatttacagccagagccgcttaagcttggcgaattcttaacaaactattaattataagactgttgtaaaagaatataccaccatttttttataaaaaagaatataaaataaagttataaaaccctttcatgttctttcttaaaacctctaacaccttgctgattcgattttctattgttctcactgatacatttaattcattggcaatttcatggtatttcttattcttaaatcgatgcatttcaaatacttccctcatttctttagggagtttattcagttccttttgaagttgttgatttaattctgagtataaaatatagttttctacatcatagtcaaatgggtcattgtgagcaattgcataatcttgatagaccctaataacattctgatgtttgagttcttctaaactattgtttttcacggcagtcataagatacgattttaaagcacctttaatatcgagatgttcccgattttcccataagcgtgcaaagatatcctgtaccaaatcttcactattttcttggtcctttagaaaaacgttgcaaaaatagacaaggtctttataatacttattaaatagaaactcaaaggcttttatatttccttgtttaagctcttttatgtaaaaagaatcttctgacgcactttttgtcctatttgtttgttcatcttccattgcgtgttctataactattagatttataattgtttggtaaatatgtaaatagatgacaaaaaataaagttataactaactaattaattaataactaactaattaattaataactaagtatttaagttggtaatatccttaaattcagtaagttaaagaaaagtccccgcttttcacatgaaaaaactgaaccatagaacatggtcaaaattagccaaatccttttaattatgcaagatccttttggaaaaatctatcaattggatatgtgttaaggtatgctctatatggctcattccttgtgttcagtttgacatagctttagcatacataacctttattatttaatagtatatctgtcttcttcatatttataattatagaatgatctggtagattggcagttctttttttgaagtaaggtatgtaaattgttttatatctatatgtaaaaaagtgttaatatattgtggtgatcacgttgttaaccgtcttaaaaatgttatgcgtggaatactatggccgcctaaatcttttaatggaggaattgagttcatgagtctataaatcatgaataggtggaaatttatagtgtgtggttacttaacacattatgcgtattattctttgtattacagatagcattactataaatatattaattaaccttttaactattagtccatgagcagatactttaatggttacacttgcgctgtgcgcccgccaatctttgcgtatccgtttatttctttaaatgaaaatccgagtacaatttactagaatgtgtttaactgaataatttaaaacaatgaagaaaatcgtttatgtattattgttatgcttgttatatcctgctggtattcttcaggcatggaatggcaaagtactaatttctactccccgttcatctattttattgaatacgtggggagagggtcagcaattgcaatttgcttattttggtgacagaattaatgagaatcaaatagatcaggtctttgattcgtggaatggattgagccgtccagcttatccggtatttggtacttcatcttatgaaagttcagcattacaggtggttcatgctgatggtaacttaacattggatttgattgtagacaaagtggaaactttggatgaaaaaagcgcaaagcttacagtgattcatttaaaagacagagtttaccctttttatgtaacgttgaattttcgggctttcaacaatttggatattattgaaacatggactgaatattctcataacgaaaagaaagcggtagtacttaagcgctttgattcaggtcattttatgattcgtagaggcgacgtgtggatctcttctctatccggacattggggtactgagactcggattactacagaaccgttgacttctgggatgaaagttataaaaaatatggatggagtacgtaacggattgggtgaacactcagaggttatgttttcattggatggtaaacctcaggaaaatagtggacgtgttattggagctgttctgtgttggggtggacgtacgaaaattaggatagattctgatgatacgtatggtagtcatgtgcatcatgtttttgccggtatgaatgaagaggcttctgaatacaaacttgaaccacgtgaagtatttactactcctaaacttgctcttacttattcttgtgaaggattaggtgaagctagtaggaacctccaccgatgggctcgtatgggtatggtatatagctgtgataagccgagagatattctgttgaacagctgggaaggggtttaccttaatatcaaggaacaagaaatggatcagatgatgaaggatttcgcagccatgggtggtgaactatttgtaatggacgacggatggttcgggaataaatatcgtcgtatacaagataattcatcattgggtgactgggtagtagacactcaaaaactccctcatggtattaaaggacttacagatactgctaaaaaatatgggattaagtttggtatttggatcgaaccggaatttactaatacaaaaagtgagttggttgaaaagcaccctgattgggtactgcgttctatgaatagagaattaatgtgtggccgtggtggtacacaagtagtactggacttgtgtaatcctaaggttcaggattttgttttcagtgtagtagatgggctattgagtaagaatccggaaattgcttatatcaaatgggatgctaatggagaaataatgaactatggctcaagctacctgccaaaggataaacaatcacatatttatattgattatcaccgtggcttaataaatgtattggaaaggattcgcgctaaataccctgatgtagttatgcaagcttgtggtagtggtggcggacgtgccagctacggagtgatgccttatttcaacgagttttgggttagtgataatacagatgctttgcagcgcctcttcatccaatggggaacatcttacttttatccatctatagcaatggctcagcatgtaagtgcatcgcccaatcatcagacaggccgtcttgttccattgaaatttcgttttgatgttgcgatgactggtcgcttaggtatggaaattcaacctaagaatatgaatgcagatgaaaaagaattttccaaaaaggccattgacacttataaagggattcgtacggttattcagtatggagaccaatatcgtctgatttctccgtatgaaaagaaagcggttgcgtcaatgatgtatgttactgagaataaagaccgtgcagtgttctttgcttttaaaatggaacactatgttaacccacgattacatcatgtgcgtctggatggtttggataaaaacaagaagtatcaaataagagaattaaatttggctgcagatgataaaccttgttatttacacaatcggattttttccggtgatcttttgatgaatgccggttttgctcttgatttaaataaggagtatgatagctgggtgttggagctgactgaggttaagtaagtcataatacatctttaactgtatggatgcagtgaatatggctgcatccatacttcgattaatagagctcatatgttaaatataaagtgcaaattattagttttttatgtattgttaggtgggcaattcttttcgtcgtgttcactgaacaatacgaaagctgttcaagaaagtggcaatccgttatttgaaggatggtatgccgatcctgaaggggtagtgtttgacaaccgttactggatttttcctacttattcagctccatttgagcagcaactatttttagatgctttttcttcacccgatcttgtgacttggaaaaagcactccaaaattctttcggtagaaaatgtatcctggttggaaaaagctctatgggcacccgcaattatttatgctaatgaaaagtattatctgtacttttctgctaatgatgtccacgaaggtgaaattggtggtatcggcgtagctgttgctgatagtccagaagggccgtttaaggatgctttgggtaagccattaatcaatgagataataaacggggcacaacctatcgatcagtttgtattcaaggatgatgatggcagttattacatgtattatggaggttgggggcattgcaatatggtgaaattaagtgatgatttgttgcatcttgttccctttgaagatggctcgctttgtaaggaagtaactccagacaattatgttgaagggccttttatgttaaagcatcaagggaagtattattttatgtggtcagaaggtgattggactggtcctgactattgtgtagcttacgccatggcagattcgccattcgggccttttaagcgagtcggaaaaatattggaacaagatgaggaggttgctactggagctggacaccattctgtgataaaggggttgaaagatgatgaatggtatatagtgtatcatcgccatcccttaaatgaaacagatgggaatgcccgtgttgtttgcatagaacggatgttttttgatgatgaaggttatataaaacctgtaaaaatgacgtttaagggggttacgcgcagctctttaacttctttgagataagtggtagctttctttcaataatagactttgttacaattcaaaaatgctaaatatgaaaattaaaacactgaaaactattacattttgcgcttttgtgttttgtggtatatccgcttcagcgcaaactccagtctatttggataaaaatcaaccaataaaacagcgtgtggaggatgctctttctcgtatgactttacaggaaaaaataaatattattcatgcgcaatctaaattcagtgctcctggtgtgcccagattgggtattccggaattatggtgtactaatggtccaatgggcatacgtcctgaggtcatgtgggatgaatgggatcaggcaggttggaccaatgattcttgcatggcttttcttgcactttcttgtctggcggctacatggaatcccgacatggctttattttataaaagcattggaaaagaggctcgtttccgcaacaaaagtgtattactaggtcctaggataaatgtttatagaactcctctttgtggacgtaattttgagtatatgggagaagatccatacctgattagtcgtatggtggtaccctatgtttagggcgtgcaaagcaatggggtttctgcctgcatgaagcactttgctttaaataataataaaatcaaccgtcacacttccaatccgatagttgatgatcgtacgctttatgaaatataccttccaggttttaaggcagctgcagtagagggtaaggcttggtactttatgggaggctataatttatttcgaggcgaacacgctagttataatccaatactgatgaatcagattttgaaagaagaatggtagtgggatggtgcggtcatatcagattggggagctgttcatgatacacaaactgctattattggaggcttggatatggagttcggaagctggacagatgggttaacagagggggctagcaatgcctatgataactattggttggcaaacccatatttgaaaggtataaaagaaggcatttatactgataaagaattaaacgaaaaggtgcgtcgagtattaagactaacgtttcgtactgccatgaatagtgatcgaccctggggatcaatggtcgcagatgcacataaagatgcttgccgaaaagtaggagcagaaggtatggtacttttgcaaaacaatgaaaatttacttccaattgatttatcaaaggtaagacgtattactgttattggtgaaaatgccattaaaatgatgactgttggaggtggctcttcctctttgaaagccaagtatgaagttactcctttggaaggactgagaaaacgtattggtaaacaagctgaaatcatatatgcccgtggatacgtaggtgatcctactgggggtaaaaactgggcaaaacttgaaggatgaccgtagtccagaagaaatcggagcagaagctctgcacgcagctggtaatgctgatatcgttctttttataggaggactaaataaaagtaactattaggattgtgaaggtacggaccgaacaacaatggatttgccttataatcaaaatggattgattatggatttactgcaagttaataaaaaactggttgtaatcaacatcagtggaacaggtgtagctatgccttggaagaatcaagcttggtacctgggaagtgaaactggcaatgtttgggcttctatactcatgggggatgttagtcctagtggtaagcttccatatacttattatgcgggtcttgatcagtgtggtgctcacagggtggacgaatatccaggtcacaaaggtgtcgatgctttaggaaatgaggtttatgacataccctataacgaaggattatttgttggttatcgctttattgataaaaacaagttaacacccaatttcccttttggtcatggcttaagctatactacatttgagtatggaaaccccaaggtaagtagcacgtctatggacaagagtgggcagttatgtattactcttccaattacaaatacaggcaaacgtgttggggctgaagttatacagctatatattaaaagtctgaaattttctgtaatttggctcattaaagaattgaagggcttttgtaaagtagaacttcagccaaatgaaacgaaagagggtttgtttactattacagctgaagaactatcatactttgacgacaaacagcataaatgggctgctgagccaggaaaatatgaagctttgatagcttcttcatctgctgatattcgttctaaagtttgtttcgaactgaaatagtttcatatttgccatatcattaatatatagtattacagatatttacgatgatattggtaggctgacgaaaaaaactaaaaatttttaggtgtttttatgtggggttttctttctaaacagtctttaatataaacgggaaagaattggctaaaattagcaaagcaataaagacaaaatataattatcaaatttttaaaactatgaaaaataaaaagtatccttttttattctttttaattgtgctgttatctactggaattggttgggcacagaacgagaaaataacgcttcatttggataatgtatcattggagcatgtgttaagcaagatcgaagagaaaacagcgtattcttttcagtatagtaaacaggtgattgatgttcgtcaaaagcgtactatacatgttgataaacaaacaatacataatgtattggaaaccttgctgaaaggaacttctattcagtatcaaatcaagaatagacagattatactgagcgcaaaaaaaacggtaaagaccaatacaaaaatgttgaaaggtataatcaaagaccgtaaaacaggggaacctataattggggcaagtatcgcggtggaaaaggaatcaattggcgcaatcagcgatattaatggtaattttgcaataaatgtttcagcagataagaaaattgttgtttcttatattggatatgagtcgcaagtgcttgatgtgctggataaatcgtttttagaaatttatctgagtgaagatataaaactcattgatgaagttgtagttgtgggttatggctctgtgtcgaagaaaaatcttacgaccgctattgcgcaagtgaaaactgataaaatttcacaagctggtaccagccatgttaaccaattattgatgggacgagctgctgggttacaggcaacagtgaatagtatgcagccagatggaaaggtgaatatatcaattcgtggaggaggaaatcctatctatgtaattgatggtatcgttatgccgaataacgcccttagtggtaattgtggccaagtgggtcttccgaataatatcgatcgtaatggtattgccaatttaaatccggcagatgtggagtctgtagaaattcttaaagatgcctctgcggctatctatggtattggagctgataatggagttatattgattactactaagaaaggaaaagaaggagcacctaatattgtgtatgatggcagctattcttttgtacgtaactatccatatctagatgttctgaattcaaaagagtacatggagttagctaatgttttcaataaggaaaactatttgtataataacaagcaatatccttatggaacaactccttatgatggaaaatggaaaccccagtttactgaagcggatatgcaaaatgcaaccgatacggactggaaggacttggtattacgtaatggtttccttaccaaacataatctgacgattagcggaggacactctaaatttaagtattatctaggaggaagctacctgaagcagcaaggtactgtatcaagatctggcatgactaaatattcagttcatggtaatttaggtttggatttgttccctttcttgaacttgacatcggtttttaacgctaatcagaatacatatgataatggtataattggtactgatacaggaaatcagggtgatgttgctcctagtgttttgacatcagctcttctgtatccatcttatttgccggtgaagcaggatgatgggagttatacaattttccgtaatattcctaatcccaaagcaatggaggatattgtggactatagtaaagagaatggatatagtttaaatttctctatcaacgcgaagttgtataaagacattctagtatttaaaggggtatatggcatgaatcaagaaaatgtcagaagatcaacattcattccatccgatgtgtattttgccagaatgtataagtcaagaggaaatatttactcacagcgtagacagacacaaaccctagaagcgatgttgtcattttcgaaatatatgtttaatttcgtacaagtggatgccatggctggtatgggaaaatatttggaaagcaatgaaggatacggtatctcttacgaagatacacacgacatgattaatgagcatgatattagttcagcaaaaggaaagatatatccaacttctcatacattgaaaaatgaaaaaagatctcagttctttaaattaagcttcgatgtcttggatagatatgtcatttcagcgacccttcgtcgagatggaaccgataagttttttccagggaaaaaatatgctttgttcccttctgtttcagcagcgtggaaaatttcaaatgaaaaatttcttaaggatgttttttggattaatttgttaaaactgagagctagttatggtaaaacaggacaggataatttaggtagttcactttatggtgtttatgagcctagcggatttaaggtaggcttcaatgataatggccttttttatgtaccttgtgtctcaatgggaactaattatcctgacgtaagttggcaaaaaactatcatgaagaatatcggtttggatttctacttgttcaaaaaccgagtaagtggtagtattgatgtattccgcaatgatgtgaccagcttattgggctatgcatcaacatcacctcttgccatttacccaactcgtcctataaatggaggccatttctatcgtcaaggatgggaaattatgcttgatactaaaaatatggtcggagattttaattggaacacgcaactgactttctcgaaaacgaattcgttctggaaagaaagaatgccgaactatgattatcgtagctatcaaaaaagaaacaaggaacctatgaatgcctactattactataagatgactggtattattaacgctgaccgcagcaatatgccggagtcacaaaaaacattgcaggcagaagcccaacttccaggttgtccaattattgatgataagaacaatgatggaaaaattgatgaaaatgatatctacctaaaagataatacaccagatatttatattggttttggcaatacattcacttataagaattgggagttcagtttcttcatgtacggacaatttggaatccttaagtctaatattgcgtatagagctgcattacctggtccgttagcggtagactatccggaaaatactaacaaatatgcttacctgctttggaactctcaaaccaatcccaatggtactcgtcctggactggccgtggatcgcatgggtgcattgcctggaggtgctggcgttaatatagacatggaaaatgcctcgtttgtgagaatgagaaatataactttatcctataatttcagggataaaatcttgggtaaactcaaaaaatatgtgaaaggcattaaagtttatgcagatgttcaaaatccgtttgtcatcagtaaatttaagggctttgaccccgaaatatatacaggtgggggtggagcaaacaatgcatccagaggcgaatatcctcaagctcgcacattcacacttggaacaaacattgtattctaattaatattaataactgtgattatgaaaaatataaaatccttcatattgttttttattacatcattagccttatctggctgtgaagataatttcgatcctaaacttttcggaacattgaatccggaaaactatcctaaaacagaaagtgaatatgaagattacacgatgacgtgctatattccttttacaacaacatggcagtatcaaataggaaacgatccgggtcagcatagtttctatatccctgaagggggtatactgagagtttttgaggctccgtctgataatatggccgcatggaacttaggctggggttcatggatgaaactttctcaagcagattacagggattgtgtctacgcagaacgttcatgggtgggtgagcataatatcaaccatattcctaagttagcccagattactcgctttactgagattatctctactttagagcaggcagacgatcaaattttcaaaacaatcagcaaggaaagactgttaggtgaagctcatttgtgtagaggcctgatgctttattatctcatgcatatttatggaccattgcctgcaattgtggataaggataatataaataatgaagcagctttgactaacctagtcagaccttcgttggacgaaatgagtacctggatttataatgattttcagtttgctgcggataatctgcctaatgaagtaaaggaacgcggtcgttatacttcagattatgctaaattttgtatgatgaaacattgccttaatgaaggagaacatatgacaggctattatgataaagccatgcagatgtatcaagaattgagtaaagataatcgatatagtttgtttaagaagggggataatccttatgttgatatgtttaaggctgcgaatgattttaattgtgaaatcattatggctttaagttgtgatccttctgccaatggggacgttagtagcggtaatttctttccattgtctatgcttgctacgcctaacgatgcttctaaagttgatgacaagggaaatcctacaccttttaactatcaaggaggtggatggatgcaggcatacaatgtttcaccaaaactgtatgatagttatgaaccaaatgataaacgtcgggctgtgatattggatgagtattgggtcaataatcaaggcacggttactgggaaggtgaccaaagaagatttgggtcagcgatggagtggatatattatttataagtaccccattgaaactaatacgactttccagggtaacgattttccattggctcgttgggctgatgtattgctgatgatggcggaggtagatgttaggcgatctaatgctgcgccttcttctcaagctgtagatgctgttaatcaagtgagaagaagaagtggtttaagtgatttgtcagctcagcaaactgccaccaaggaggctttcctagatgtcatattagatgaaagagcaaaagagtttctctatgaaggacatcgaaaaatagatttaatccgctttaataaatatgcacaagcatgtttcaaggctaaagaaatgcttcctactcatcagtacatgccacttccaaattatttggtggaacaagctaaatcgtacggaaaggatttgagtcaaacttatagtcgtcctcactgggaagatgatattgcattggctaattaaaatttagatacatgaaatttaaggacttacttattagcactttctgtgtatgccttgtcagcatttacttttcgaatgttcagggacagtctcataatacgcaatttcagggagggtacctttttgcccatatgcgacatgaagactatgggcatatgtactactacataagtagagatgcacgcaaatggactaaactgaataataatcaacgagtaaatgctgaatacagaggacatcctgatataatcaaaggtcatgacaataggtattatatgatcggtgtttcagagaaaaaccagaaaccattgctttggacctcaagtgatcttgtagtctggagtattgaaaaggaacttccagtatctccttttatccttactgataattattatactgaaagaaattggttcggtgcacctaaattgtattatgatgaggattccagacagtatattgttacgtggcatgcagctaaaaaaggagccaaaggagatgatgaatggagaagcatgcgtacatattatgtgctaactgaagattttagctctttttcttctccaaaacgtttgtttgatttttcagacaaggatgaatctgagatggccactattgatgtcataatccgcaaaattggtaaaaactactatgcggttattaaggacgaaaggtggccggaagatggtgtacctacagggaaatctattcgattggctaagtcatcatgcttgaccggctcttatgctttgataaatccaaagcaccctgtcactactcccagtacttattttgaagctcctattctcatgccaaaacccgatggtaagggatggatgattttttcagaaagatatccatacgagtatgtacgttttgatgctgagcatatagaggcagaaaaatgggtagtttgtgattgtaagattcccgactcccggcatggggctatggtgcggttgagtgaaaaggagtataatcacgttttatcatcattctcacaaaaataataaaacatgtgtatgaagaaatattatctgttattgttaatagggctacttgctacggcagtatatggcaagaaaaaaatgactttgttttctcctgaaaagactataaaagtggagttttgtttatcagataagatttattatgatatttactataatgatgaagttttattaaaggacaattatcttcgcttattattagatgatgaaattttgggagataacccaaagttgttgcgacagaagcgtaatagcttctcaaaagagttgaagcctgtagttcctcttaaattctcttctattacgagttgttataatgctcttactcttgatttcaaaggttattccgttgaattcttcgcttttgatgatggggtagcttatcgttttattactcgtaagaccaataaggttgaggtacttggagaagattttgctatttcctttccagaagagtatctgctccatttacaacagccttcaggttttaaaacaccttatgaagaagagtatacacatgttacctgtcaagaatggaagggtacggacaagatgtccgtacttcccatcttgattgatactcgcaagcaatataaaatattggtgggcgaatccgatcgttttgattatccttgtatgtttttaaagggaaatggttataatggatttaatgccgttttccccaaagcacctttggagtttgcagaagatggaaatctgagtatgaaaattactaaagaggctgattatatagcaaaaactgaaggaaatcggaattacccatggcgttattttgttattagtagcgacgattcccagctcattgaaaacaccatgaattacaaattggctactaaaagtgttcttgaagacaattcatggattaagccagggttggctagttgggaatggtggcatgatgcagctctttatggtccggatgttaattttgtgtcgggatgcaattatgatacttataaatattacatagattttgcttcatcctttcatgttccatatattgtaatggatgccggatgggctgaaactgtgcttaatcctaacaagcccaattcacaaatgcgcttaccggaattgattcagtatggaaaagacaagaatgtaggcattatcttatggctatcgtgggtagctgtggaacaaaattttgatttgttcaagacttacgaagattgggggattaaaggggttaaaatcgactttatggatagaagtgaccagtggatggtgaatttctatgaacgtgtagctaaagaagctgctaagcatcatctcctagttgattttcatggatcttttactcctggaggtttagaatataaatatcccaatgtcgtttcctatgaaggagtgaaaggtctggaacatatgaggggatgttatccagataacactgtataccttccttttatgcgtaatgcggtaggccctatggattacacaccaggacccatgataagtatgcaacctgaactctacagtgctttacgtccaaattcggcgggtgtaggaacacgggcttttcaattagctacattcgttctttttgagagtggattgcaaatgttggctgacaatccggttaattacagaaaaaatgaggattgtgctcgttttatttcacaggtccctgtaacttgggatcagaccaaggcgcttaaggctaaggttggggagtatgtaattgtagccaagcgcaaggggaagaagtggtttattggaggtataaccaacaatgcagtacaggaaaggaaatttgaaattcctcttgattttctggaagaagggcgctcttatcgaatgagtagttttgaagatggcattaatgctaatcggcaagctatggattatagacacaagcagactcccgttacaaagacttcgtctattactattaccatgaagagaaacggtggttttgctgctgttatagaataaaaacaataattgttaatctgaatatgaaaacatattggcattttcttctagcattccttgttgctatattaggagaagcatgttcctctcctcgaattgatgtgactgataatcaaatggataagtgtgtcagtgatttgatggatcgcatgacgttgcgtgaaaaaattggtcagttgaatttgccttctgggggtgatatcacaacaggaactgtgaaaaatggagaactgagtgaaatgattcgtaagcaggagataggtggcttttttaatgtgaaaggcatcgataaaatttacgaattacaacgtttggccgtggaagaaagtaggctgaaaattcccttgcttgttggtgcagatgtagttcatggctatgaaacaattttccctattccattggctctttcgtgtagttgggatacgttagctgtcgaaaaaatggctcgcatatctgctattgaagctagtgcagatggtgtgaattggacattcagtccgatggtagatatttgtcgtgatgcacgttgggggcgtatagcagaaggaagtggagaagatccttatcttggttctttaatggcaaaggcctatgtacggggatatcaaggaaacaatttacaacggaacgatgaaattctttcctgtgtaaaacattttgctctttatggagcctcagaatcaggacgtgattacaatacggtagatatgagccgattacgaatgtataatgaataccttgctccttataaagcagctgtagatgccggggtgggtagtgttatgagctcattcaatattgttgatggaattccagccactgcgaataaatggttgatttctgacttgctcagaaaagaatggggattcaaagggttgttggttacagattataattccattgccgaaatgtcttcgcacggcattgctcctctgcaagaagcatcagcacgttctctacaggcaggaacggatatggatatggtatcctctggttttctgaacacattgaaagaatctcttcaaaagggagaagtgactgaagaacaaatcaatatggcttgtcgtcgtgtattggaagctaaatataaattagggctgtttgacaatccttataaatatagtgataccctacgagcatcgaaacagctttatactactgagcatcgttctattgctcgcagcattgcatctgaaacatttgttctgctaaaaaatgagaagtcattgcttcccctttctactaaaggaaaaatagcactgattggtccgatggctaatgcacgtaataatatgtgtggaacgtggagtatgatgtgtactccttctaaacatcgtacgttactcgaagggattcgtgatgcggtaggtgataaaggagaagtcctttatgctaaaggaagtaatgttttctatgatgaaaatcttgaaaaggcagctgcgggtatgcgtccattggaccgtggaaataatcagactttattgaaagaagcattgcagatagctgcccgagcagatgttattgtagctgctttgggtgaatgtactgagatgagtggggagtctgcttcacgaactatgctggaaattccagatgctcagcgtgacttgttaaaagcattagtcaaaacaggaaaacctgttgtgttgcttctcttcacggggcgtcctttagcgctagttgaagaatcagctattgttccttccattctaaatgtttggtttgctggtagtgaagctggagatgccattgctgacgtgttgtttggaaaagtgagtcccagtggaaagcttacgacttcattcccacgttctgtagggcaacttccgttgtattacaatagtcacaatacaggtcgtcctgatccggatagatgtacgtttaatcgttatacaagtaattatttagaagatagcaatgacccattatacccatttggttatggattgagttatacccatttccgatatgacgatatggtattaagttctaatgttttaaagaaaggtggaaaaataattgtttctgttactgttagaaacgaaggaggttatgatggttatgaagtcgtgcaattgtatttgcgtgatatctatgccgatgttgttcgtccggtaaaggaactgaggaaattcgaacgcattttcttaaagaagggggaaagccgtgaagttaagtttgtaattgcagaggaggatttaaaattctacaattcgaaattgcaatatgtttatgaacctggagattttgaagtcatggtaggtacaaatagtcgggacgtacagtctaaaacattttttgcagaatagcttttatctgtcttctttgtatcatattcgcttttagaacattagtattagatataatatagttatgaaaaaaaatatactgttagctttgatatggatagtgtgtggatttacttttgtttatgcccaagatctgttttggagtataaagacatcagattatcatagcacctattatggtactgccgtaggaaatggaggaattggtattttaccttggaaagaacctttctctgtcaagcaggtagtactgaatcatgtgtttgatgcaggtgttccacatgatgttagtaggctgatttgtggtattaacccgttctgtatagatatgaaagtggatggggaagtattggatggaaaacttttatccgattgggaacaatgtatcaatatgaaagaagccatacaccagactcgatttgtttatgccaataagttggaagtatcttatagtatctgcgccttgcgcagtatgccttatgcaggtttggtgagagtgaacgtaaaagctttagatcctgtcggcttgtcggtggaaaatagtgctgatgtccccgatgattttttgcagcctgtagtgcaccggaagagtattaaggattttggactcaatttgaaacttttacgtacctccgctttgactaggcatagaaaactgcaggtctctgctacttcgactttcatttttgagcatgaaacggaagttacagagactggtaatggtcgaaacgtatttacaaaggatctaaagaaaggagaaacattttcttttgctttgttaggtgctgtctgtacgcatcgtgattttatagatccttgcaatgaatccgatcgagaggttatttatggagctaaggaaggggttgataggctgatggatttacatttgaaacaatggaatgagttatgggaaggggatattcaaattgtaggtgatgccgaagcgcagcttgccgtgcgttttgctctttttcacttatattcaagcgctcgttcaggtagtcgcttgagcataccaccgttcggattgacatcgcaagggtataatggacatattttttgggatacggagttttggatgtttcctcctatgctttttctcaatcagggaatagcacgctcaatgatggattatcgtaccgatcggctgaaaccagcgtgtcagcgggcatttagctatggttatgatggtgccatgttcccttgggaaagtgacgatgctggtgaggaatcatgtcctacttttgccttgacaggtccttttgaacatcatatatcggcagatattgctattgctgcttgggattattattgtatgagccgtgatatgcgttggttgcgagaagaaggatatcctctgatggaaaaagtggctgaattcttgtcaagccgtgtggagcagaatgaagacggttcttactcaatttgcaatgttgtttgtgccgatgagtatgctgagggggtcaatgataatgcatttaccaatgcggctgcgatgtgcgctctgcaagatgcttccaaagcggcagttctttgtggtgtaacaccccctgtttcttggaacattattgcagagagactgcgaatacccagattctcagatggagtgactagagaatatgatggatatgatggtcaggttattaaacaggcagatgcgaacttgttggcatatccgttaaaagtcataactcaaccagaggaaataaagagagatttactctactatgagcccaaaatcgataaaacagggcctgccatgtcttattctgtattggctctgcagtatgctcggttgggtgatggtgagaaggcctacgaattgttcgtgcgtagtttccggccaaatcagttgccgcctttcggggtaatctctgaaggtgcaggaggaacaaatccttattttactactggggcaggcggattgcttcagatggtgattaatggtttttgtggtttggacttgaccgatgaaggtattaaacagttgccttcagcactgcctaggcattggaagaaaatcgttgtaaagggagtgggagcaaatcgcagaacatatgtccgtgaacaataaatactcttcatgaaaatatagtttttgatttagtgcatgattagcttaaagagtttcaataggaaaggcctttaaagatgtttgcattttctatgtttagttttaaagaatcggtttcttttaaccgaagtattgattgtatgaagcgaattcttttttcccaattatatactttaatatactaatttttattctatctatttatatcttatttcaataggggaaatcttttaggcttccctactttttttatgcccgttttcaagtgaatcaaagaattttgttaaagaattctaagtggataacacttaagatcggatttgggtactattacaaaaagtgaaataggaatccgattgtttccggcagtcgggttctattttttatatagatatgataattatactcagataaaagccaagtgttccaagtatcgtattggaagcacttggttaatgtttaaatgagcaataattacaggatatatgtatatgataattatacccaattgttttatttaagtatctattttttaataacttatgttctgtgtgttaggttttttttattatgtttatataataaaaataacatgtcaattggaaacagaaataatcaatattgtagaaataataaagaagaataaacaaatgcgaggagtaaagtcatttattgatttgatgaaatccttttatcctgaattcaaacagacaatgcaacagtgtcgaattcattgttagttaataatttatatttttcctttggggtcatgtaacccaatctttttctcggtcttgagtttaagatgttttgaacgcgcattacctgttcattggttatgtccctaaagtccgtacccttcgggaagtattgcctaatcaaaccattgctgttttcattggctcctctttcccacgagtggtatggttttgcaaagtaaacaaaaatatttagtttacgtgcaatttcttcgtgaaaactaaattcttttccattatctgccgttattgtatgtatttggtctctaaaaggttccaaggcatcgatggcagctttagttagcgggctggcatctttcccgctaagtagtcttatccatactagtccagttaccctgtcgtttatagttaatagtgctcctttgtgattcattccaatgactgtgtcaatttccaaatcaccaaaacgtactttcttgtctactatcgtaggacgcttgtctatgtccacgcggtttttgataaaaccacgtccattagtcaatgcacctctcttcttatgacttcttccccgtcttcttaaatgcttgtataacaacttatctccatgctttttatcttcccaaatatactggtagattgtctcatgagaaactgtttccaagccctttgttcgcataaacccagtcacttgttctggactgaaatctttctttatgagtatatctacttgaattttcaagtcgtccgtaaacttcacgaagtgctttcgtgaacgcattctggacatatacttagcctgagcgagatccggtttgtaaatgccattacgtttatcactattacgacgtaattcacgacttatagtgctacgatgaactcctacaagattggcaatctcggttcttgactttccgctttgcagataagcggaaatgttatacctttgttcttcggttagctgtttcatattgcaactgaatgttggggaactggaagatgcaaagaaacaacttttccacaggggaacaaaagggaaagaaatcttctttctctgttcctctgaaaaattattcttttcgtatcttctcattgtcatcattctcactcctgttgcattatccgcttgaacttaggtatgatgaaaaattatgcagagaatttcttgaagatattaaatggcatggagaaccaatttgcccacactgtaattgtcaaacgaaagagcattataagttaaagtctaatggagaatttaaaggactatataaatgtaaacaatgtaagaaaagatttacggttactcttggtacaatgtttgaaggtagtcatgtatcattaaagaaatggttctatgcattgtatatattcttaacccataagaaaggaataagtagcatacaattatctaaagatatccttctataaggagaaggtgggtgaaccaataaagaaataaccatagtattaaccatagttgcctagtctggagagattggtagaggttgtggtgagtacaagattttagtgaagtaatagatatgagttgcaggctcagagcttaccagcatagtgtaagcatctgatagttaagccagcttttcaacgatgcctttaagtcatgatggaaaatccatcaaactttaaactttaaataaacatttgcttacacaggaagtgtttgcaattgattttcatagctatattagagtggcacaggctgccattgaaggctgataccaataatactgaataatgaatttatggactgcatgctttacttggtaatggcatgcggcccattttgttggaaaaaaactgtagtttctattaatttatttgtattttctttagtatatttgcttcctataattttatagttttccaataagcaagcaataaacgatgatgctaacaattacggcagcatatgatgtctggaccagcggcctctatcagaaggatgaagcattgatatacagttttggcatgattgtcattctgcttttggtcatcatgataatcatttccatcagtaaaagcaaaaggttgaagacgttgcagcgcattaatgaggttgccgaagaatccaaccagctgaaggatgctttcatagctaatatgactcacgaaattcgtactcctttgaatgctattgtaggctttacaactatgcttgccgaaatggatgatctggacagagaaacccgtatggctttcctgaaagagattaatgataacaaggactcgctgctgcaactggtcaatgacttgctggactattcaaagattgaggcaaagaccctggaatataatgatggagaagcggatgtgaacgcgctgattgatgaagtctgcacgacagagaatatgcgctcgcatcccacaggtattcaggtggagtttgtagaacggctgcctcaatgccgtttggtggtagatcgcgtgcgctttgcccaagttataggtaacttggtgaggaacgccttgaagtttacggagatgggcagtgtgaaaatcggttgtaggagattgagtaatcataacttctatttttatgtggcagatacaggctgtggcattgatgaagtgggaagacatgccatctttgaacggtttgtgaagatgaactacaatattaaaggtacggggttggggctttccatcactaaatccattgtggaacactatgggggaggtataggtgtggagtccaagaaaggggaaggctccactttctattttacgttgcctgccggtattgaatacaaagagtacggtaaattttgatttacctgcgctctcaatcagccatttccttcagcttcttgaagtggcggattacttccagataatcgcggtcggtgcaggcgttgaatttattccataagtcacccattataacggcaccaccgaatccgtaatcctttatctccaggatgttatcggaggtaatgcctcccaaagccatgactttgctgtctataattttacttttttctgcttgtcgtagttcttcggctgtaaagcctgatgtaactccggtctttgtgatgcaattatatatcggactcaagaatagatagtcataaaaatgtttcttgttccgcacttcgtccagcgagtggcaggtacagctgatgtgtcctgaataatcgtgcggttctttggggttgcgggtgtttagatgaatccccatcaggctgaattcttcctgtaggtagaagtgttcatgagtaatgatgcgcttatggtatttttggggtatcagcgttaaaagtcgttctgaatacatggcgggagtttccggcttcctcagatgtagaatatccagcccctcttcgaatagtgccgtgataatcttgtcttcttccacaaaaaatgtgggtgctgttactacgatgagtttcatttctttcgtttaacttttaagtttagcaaagttaatgaatacttatggtagaagccaaggaatttctttaaaatatgttagatggctgctttaaacaagaaaacgccttcttgcgtctttataactcaagaaggcgtccttcacatggctttgtgggacctcgttggtctatttgaatcttttacttaccgcatcccaatcaacgatgctccacaattcgtttacgtgatcggcacggcggttctggtaatcaagatagtaggcatgttcccacacgtcgaatccgagtagcggaacaagaccggcgcgtaccggattgctaccgttggcttctttggtgatgtggagtttgccgttcttgtcggcagacaaccaagcccatccggagccgaacaagccgacagctgccgcgttgaattccttcttaaaattctcaaagctgccgaagtcgcgtttgatggcttctgccagcttgccggtaggctcgctgtgggcaggcttcggggcaagctgtaagaagtataatgtgtggttcaacacttgtcctgcattgttgaagatggcaccgtccggtgctgtggcaacaatggttaccaggtctttgccttcaaattccgttcccggaacgaggttgttgaggttgttcacgtaggtttgcagatgtttaccgtagtggtaatctatggtttgctgactgattacaggttccagtgcattgttagtgtagggaagttttggcatttcgtaagtcataactgttatcattaaaatcgttaatattgtattcataagtttcaattatttaattttggaactttactatataaacactataacctatagaaatgttcgtacgtctccgaagctttttttatctttgcctccgtaaaaacaaaggaaggaaaaatatcatcattttaagattatacggatatgcccgattatatagaggaactgaacgaaggacaacggaacgcggtgttatacaatgacggtccgtcactggtgatagccggtgccggttcgggaaagacgcgcgtgctgacctacaagattgcttatctgctggagaatggctaccagccttggaacattctggcattgacctttaccaacaaggcggcgcgcgaaatgaaggagcgtatagcccgtcagatggggccggagagggcgcgccatctgtggatgggaacctttcactccatattcctgcgcattctgcatgtcgaggccgggcatatcggcttcacttcgcagtttaccatttacgatacggcggacagtaaaagcctgatacgttccattatcaaggaaatggggctggatgagaaagtgtacaagccggggatggtgcaggcgcgtatctcgaatgccaagaatcatctggtttctccggcaggctatgccaacaacaaggaggcttacgaaggagaccgtgctgccaaggttccggcgcttcgcgacatctaccagagatattgggagcgttgccggcaggcggatgcgatggacttcgacgatttgctgttctacacattcctgctgttccgggaccaccccgaggtgttggcgcgttatcaagaccagttccgttacattctggtggatgagtatcaggataccaattttgcacagcacagcatcgtgctgcaacttgccaagaaccatcagcatgtctgtgtggtgggggatgatgcacagagtatctactccttccgtggtgccgatattgacaatattctctattttacgaaagtatatcccgatacgaaggtcttcaagctggagcagaattaccgttccacccagaccattgtccgcgcggccaacagcctgatagaaaagaaccagtggcagatacgcaaggaagtgttctcggaaaaggagaagggagaggccatcggtgtgtaccaggcatacagtgacgtggaagaaggggatattgtggtgaataagatagctgaactgcggcgtgaaaagcgctatgcctactctgattttgcgatactctaccgtaccaatgcgcagagccgtatttttgaggaagccatgcgcaaacgcagtatgccttaccgtatttacggaggtttgtcgttctatcaacgcaaggaaatcaaagatgttatcgcttacttccgtctgatagtgaatcccaatgatgaagaggctttcaaacgtattatcaattatcctgcacggggtatcggagatacgacagtgggaaaaatcattgctgccgccaccgggcacaatgtcagtttgtggaccgtgctttgtgagccgttggcgtatggcttgaacttcaataaaggtacggtgggaaagttgcaggcattccgcgaacttatatctgcctttatcacagatgctgcggagaagaatgcctacgagattggtgctgacattattcgccaatcgggcatcatcaatgatgtgtgtcaagacaactctcccgagaatctgagccgtaaggagaatatagaggagctggtgaacggtatgagtgatttttgcgcccaacggcaggaggaaggaaactctaacgtgttgttgggtgacttcctttcggaagtttcccttcttaccgaccaggattcggataaggatggggacgatgagaagataaccctgatgactgtacattcggccaagggattggagttcaagaatgtgtttgtagtggggatggaggagaatctttttcccagcagcatggtgggtgactctccccgggcattggaggaagaacggcggctgttctatgtagccatcacacgtgccgaagaacactgtttcctatcgtatgcaaagacgcgtttccggtacggcaagatggagtttggcagtcccagccgttttctgaaggatatagacgtacggttcctgcgcctgcctcaggatgcgggaatgttccgcagggtagaggaggaagctgccgttttccgcagggagaacgccagaggctttgcgcctgatagggaagatgctccgtatggaggaaaagagcgtgtgtctgtacggccgaagcagcagattattgcgccgaccgttccacgtaacctgaaacgggtggcgccttctgcaaatacggcaagtacatcgccttctgccggcgcgtctgccaaccgtgtacagcagggacaactgatagagcacgaacgtttcggcctgggtgaagttttgaaagtggagggcgaaggagacaatgcgaaagccaccatccgcttcaagaatgcgggagacaaacaacttttgctgcgcttcgcgcgtttcaaagtgctgtcataggatagtacgcatcttttgtctcacacagaggcgggatacttgtaagaggatgatggcatgagtgtaggactgtggtatcttaaaaaagacagttagaacgatacatacggacaatttagaatagtaaatatagatagaagaatgacaaataaagacttttcccttttcccttctccctgctatattatggaagaaggattgctgagaaagaacctcgcactgataaaaagtgtggccgaccgcgcaggtgtggagataatcctcgctttcaaatcatttgccatgtggcgttcctttcccattttcagggagtatatagaccactctacggcaagttctgtctacgaagcccgtctggcattggaggagttcggaagtaaggcacatacgtactcgcctgcctataccgaggccgattttccggagataatgcggtgcagcagccatattactttcaattcgctttcgcagttccaccgcttttatccggtagtggtggcggagggaagcggcatttcctgcggtatccgtatcaatcctgaatactctgaggtggaaacggagctttataatccctgcgcacccggtacccgcttcggtgtaatggccgaccagcttcccgaagaacttccggcgggtattgaaggttttcactgtcattgtcactgcgagtcttcttcctacgagctggaacacacattggagcacttggaaggaaaattctcccgctggttctcacagattaagtggttgaatttaggaggcgggcatctgatgacgcgtaaggattatgatgtagagcatcttgtccgtctgttgcagggcttgaaggggcgctatccacatcttcaaatcattcttgagcccggttccgcttttacttggcagaccggtgtgctgagctcggagatagtggacattgtggaaaaccgcggcattcgtaccgccattctcaacgttagctttacgtgccacatgccggattgtctggagatgccctatcagcctgcagtgcgtggagcggagatgggcgatgcgggcccttacgtctatcgccttggaggaaactcctgcttgagcggcgactatatgggactgtggagtttcgaccatgagctgcagataggggagagaatcgtctttgaggacatgatacattacaccactgtaaagacgaatatgttcaatggaattcaccatccggccattgcaatgtggacaaaagaaggaaaagctgaagttttcaagcaattttcttatgaagattatcgtgggcgaatgagttgataatcaaaagtctgcttgtatgcctggcgaaaatgtacacttttctgtgtgaaaaaagtctgcagaatgtttgcaggtttaaggaaaatatctacctttgcatccgcaatcgcggaaatagctcagttggtagagcataaccttgccaaggttagggtcgcgagttcgagtctcgttttccgctcaacgcagtttagattgcaattacctatgcccaggtggcggaattggtagacgcgcacgtttcaggtgcgtgtgtcgagaggcatgcaggttcgagtcctgttctgggcaccaaggtaaagcagtcggttctttgaattgttgaaagtaagttggagaggtggcggaattggtagacgcgctactttgagggggtagtgacaattatgtcgtgggagttcgagtctccttctcttcacgcttttatacattgcggaaatagctcagttggtagagcataaccttgccaaggttagggtcgcgagttcgagtctcgttttccgctctttcagatgtattgaagatgacttatgcccaggtggcggaattggtagacgcgcacgtttcaggtgcgtgtgtcgagaggcatgcaggttcgagtcctgttctgggcactttactcctcaaaaaaggagagtcatccaatgcggaaatagctcagttggtagagcataaccttgccaaggttagggtcgcgagttcgagtctcgttttccgctcttttcagataaaaaaatcccgcaagcattgttcggtgcttgcgggatttttttgttgtatggaagttgttgttacagtttctgtaatgagaatccgagcatcattccgtcgtagctgttggccagcgagccgatactcttcagagtggagttgctgcttttgctggagaggaaggttatcagtttcagtagcttgtccgattcgaacagcaggtccatagttgtggaggtagcgttgaccttggcattcatacctatcagcttggcgaatttcaagttgaccttttgggtggatgcattgtaggagtagcttcccttcatgctcttttgccctactttggcgctgaatgtgctgtcggcgttgaatgtgaatgacatttgcccggctttgatgcctactttggcaagctgttcgtccagtttcttttctgcggctgtggcggcaacggcaccgccggctttctgcagcaggttgtccgattcgaattcaatggcggagccggtatacgaccaagtgccggtcatatccgctgttgacttgccggtcacggcatttaccgccttctctatattttctttgttgaacaaatccttgatggattgtgcgtgactattgccggtcagcagtagtgcggcaacaaacagttgccaaaaaactaatcttttcattttacttatgtctattgtttgctattcaggcttttgttgatactttcgatatagtccagcagctctttccgtcccatgcggttttcagaagaggtgatgaagtagggaggcagctcttcccactgttccttcaactgttccaggtattcgttgatgtgggtgttcagtctgccgcctttcagtttgtcggcctttgtgaagacgatggcaaagggtacgccgttctcgcccagccattccgtaaactcgaggtcgatggcttggggagccagccggctatctataagaacaaacagacaagtcatctgttcgcgttgcagtatataactttctataatacgtttgatttgttcctgacctttctgtccccgtttggcgtagccatatcccggaaggtctacaatgtaccagctcttgttgattaggaaatggttgataagcatggtctttcccggtgtggcagaggtcatggcgagtcctttccttccggtcagcatattgataagactggattttcctacgttggagcgtccgatgaaagcatattcgggaaatgtaccggcggggcatttccgcacgtctgtgttactgatgacgaattcggcgtttgtaatatccattttgttgcctttttggggttttacgtgtggcaaaggtagcactaatttcataagtttgcactatctttgcccagaaagcgaagataggctgcacctcagcataaaaaatgaacgagttcattttattctgcattcggtttgcactatctttgtggccaataggaaaattttaagtatgaatggacagtttccctcgacattattggagaaggcggtaaatgagtttgccaagttgcccggagtgggacgtaagacggctatgaggctggttcttcacctgctccgccaggatacggcagtggtggaagcgttcggcaatgccattgtgacgctgaagcatgaagtgaaatattgcaaggtatgccataatatatcagatacggagacgtgccgcatctgttccagtccgcaacgggacgcttccgtggtctgtgtggtagagaatatccgtgatgtgatggctgtggaagccacacaacagttccgtggtttgtatcacgtgttgggaggcgtcatctcgccgatggatggcattggtcccggagacttgcagatagaaagccttgtgcagcgggtagccgccggtggcatcaatgaagtgattcttgccctgagcacgacgatggagggagatacgacaaacttttatatctaccgcaagctggaaaaactgggtgtgaagctctccgtcatagcccgtggcatttccatcggcgacgaattggagtatacggatgaagtgactctgggacgcagtatcgtgaaccgcactccattttccggaactgcctgatcgtgttgggcttctatcaattattcattatccactatcaattcactaaatggaagaacaaataaagaagactgcattgcgtgtccgaacaacttttgcttatttctggatgctccccatcctactcgtcctgcttggagaaaccggaggcgaatgggtaggtatgtatgccggagatgtacgtgctatctatatggctgagacgataaccattctgctggctgcctcttgcgtgcccgtatccctgaaactcttttcatgggtattaatccggaaaatagatgtagtgacgcttcccgaagccctccgcctttatgcgttgtggagtggcgtgcggctggcattgcttgccataccagtgcttgcaggttttttcacctattatataatgttgagcagtacgggtgtactgtgtgcactgataggactgacggcttctctgttctgcctgccgggtgatggacgcctgcgtaaagaactgcatatcaataaagaagaagaaatgtaaccgactggaagatatgaataaatcttatttctgtagtgaaagggtgcgtctacgtgctatggagccggaagacttggaagtgatgtatgctatggagaatgattcccggacttgggatgtgacgaacttcaccgtgccctattccagatttgtcttgaaacaatatattgagaattccgaatgcgatatgtttgccgaccgccagctgcgtatgatgattgtacgtgtagaggatgatgcggtgataggcaccattgatattacagagttttctcccatgcatgcccggggagaggtgggcattgctatacggaaggagtatcagggcaatggttatgccaaggaagcgttgcgtttgctgtgcgactatgttttcagtttcctatatctgaagcagttgatagtccatatttcggtggataatgaggcaagtatccgcctttttgaatcctgcggttttgtgcgttgcgggcttttgagggagtggtggcgcgtaggagggtgctataaggatgtcgtattgttgcaacttctccgcaacactaattgaacgttggaatctgggggaaacgcgaccatatttcatattttgctcccagcttgcacaatgccttcttccagagtgtgccgctggctgcctcgtccattagcgagctgatgttttctttgcctaccagccaagtgttttcttcaatttcccggtccagctgttcgtactcccagccggagtatcccaaaaaaaatctgattctgcctttaacggaatttccctgcatgatgtagtttttaatggcttcaaagtcaccgttcaggtagaagcctttgccgatgggcaatgctccggtaatgcccttgagcgtgtgcaaatagaacaacgtatctgtactgagcggtcctcctttatagataggtatgttttccgggcagttgaagtctttcagcacatcattcaagaatagggggagaggtttgttcataaccagtcccattgtgccgtcatgtgtatggtccaccagtagaatgacggatcgcccaaacatgtggtcacacaaaaagggttcggaaatcaagacctttccccgggcaggaaccacatggtttgtttctatcttgaatagatctatattgctatacatgcccctaatatacataatattccacaataaacaaaagttcttcgctgtttttcattttaaaagtttcttttctcagattttatggtttttttattcgaagaaaatgcttaaatttgcaagtaattggcaatttaatacaatgaagtatactacactatatatgttaattttagggctgttttctataggatggacggattgcccggagggattttgggagcgtatgcaacgtccggggcattccgaaatacagctttccaaagtgacggtaagtggctgtgtgctggatgaaggtgggtttccgctggccggtgccactattcaggagaaagaaacggccaatggtgcgatagcggattcggaaggaaaattcacgctggtggttgccgataatgcagtgctccgtgtttcatttatcggctacatttcccaggatattgaggtggaaggacgttcgacctttcatatcacactaagagaaaatatgatagagctggataatgtcattgttaccgctttgggtatcgaaaagaaagaaaattctctttcttatgccacagatttaataaaaaacgaggaattgactcgagtaaaaatgcccaacttaatcacttcgttgaccggcaagtcagctggtgtgcgtgttaaccaggtttcttccggtctgggagcttcagccaaagtcagtatccgtggagtccgttcggtggcgagtgacaaccaacctctgtacgtgatagacggtgttcccattctgaactccacctccgagcaagcatactctgccataggcgggacggccaatgctggcaaccgtgacggaggggacggcatttccaatctgaatcctgaagatatagagagcatcagtatcctgaaaggagctcccgcggtagctttgtatggtagccaggctgccaatggggtgatactgattactacaaagaaggggcagtcgtacgggcagcgcggtgtttctttctcgacgagcctgatgttcgacaatgcttttgcgctacccaagatgcagaaccgctatggagtaagtgatggtgtagacagttggggagaacgggcaaaccttcccgaatacgataatctgagagacttcttctctactggtgtcacctccataacttccatctccttgagtcacggcaatgagaagttgcagaactatttctcctatgccaatactacggggcatggcatcattgggaaacataacctttcgaagcacaacctcactttcagagagacttccgttctattgaattcccgtctgaagttagatggcagtatgaacctgatgcgccaggtggtgaagaacaagcctaccgtgggtggtttctacatgaatcctttggtggggctctaccgttttccacggggtgaggatattgcttattataaggagaacttcgaggtttatgatgagggtagaaacttgaacatacagaattggcatacctcctacgaggattttgagcagaatccctactggattaccaatcgcatattgagcaaggagaaccgcatgcatgtcatagtctccttatccgccaatctgaagataaacgattggttaagcctgcagacccgtggcaatgtagactatattaacgacaaggtgcgccagcagttctatgcctctaccgctccggcgttagcgggagccaatgggcgttatattgagatggactatcaggaaacccaatattacggagacgccatactgatgatgaaaaagcagtgggatgcattctctctcaacgcggtgctcggtgccagtatcaatgataagacagtgaactccacccgctatgactctaaaacagcttcgctgaaatatgccaatgtgttcaatctggccaatatcatcatgaatggttctgccgggctggaccagaagattgatgtgcggcgccaattgcagtccttgtttgcgacggcacaactgggctacaacgagtttgtctatcttgatttgtcggcccgtaatgactggtcctccacgctggcttatacatctcatgagaaaagcgggttcttctatccctccgtgggattttcgctgatattcaataagctgatgactttaccccgatgggtgtcactggcaaagataaggggggcatacagcatggtgggcaatgatattcccatgttcatcacaaatccttcctcgcatatcacggcaggcggagagttcttggcaagtgatgccgcgccgttcaaggatatggaaccggagatgacgcactcctttgaggcgggtatagaagcgcgttttttgaagaatcgcattggcttgaatgccactttctataagacgaatacccggaaccagttcttcaagcttcctactctgtcgggcgataaatatgcctaccgttatgtcaatgcgggtaatatacagaatgtggggtgggaggtttcactggatgccgttcctttgctgacgaaccatttcaagtggaaaacagaggtgaacttttccaccaaccgcaacaagataatttcactgcacgaagcgctgaaggagtttctttacggtcctaccagcttctcgtccagttatgccatgaaattggtgaaagggggctctatcggtgacatctacggaaaagcttttgtacgtgacgatgcgggcgatatcgtttacggcacggaaggagacaataccgggatgcctttggtggaaggtgatggcaatacggtgaaagtgggcaatgccaatccaaaactgatgcttggctggaatcatatgctgtcttacaagaatttttctttctattttctggtggattgtcgctttggaggcgatattttgtctcagacgcaggcggatatggatatgtatggcgtttctgaagtcacggcccgggccagggacaaaggttatgtaatgcttgaaggtaaccggatagataatgtgaaaggattttataagaatgttgtaggcggacgggccggggtgacggaatattatatgtatgatgccacgaacatcaggctgcgtgagctgtccgtgggctaccaactgcctgctgcctggatggaaaagaccaaagtcctcaagcgggcacaactgtccttttcgggacgcaacttgttcttcttctacaaaaaggcgcctttcgaccctgacctggtactctctacgggcaacgataaccagggaattgaagtctacggtatgcctaccacgcgtagttggggattttctttgaagtgtgaattttaagagggggagggagacttgatatgaagaggattatagtactgattggcatggttttcgtgtttctggcttgtacgcgggactttaaggaaatcaatacggacaagtccggcgtgacggacgaggacttgcaggccgactataacgaacatggcatccgtcttggaatcatccagcaaggcatctatttcaattacgactacggaaaggggaagaactggccttttcaattgacccagaatttgaatgccgacatgttcagcggttacatgcacgatgccaagcctctgaatggaggttcgcacaattcggactacaacttgcaggatggatggaacagcgccatgtggggacatacctatgagtatgttttcccgcagatatatcagtcggagaatgccacacgtgaccgtatgcctgcctttttcggcattaccaagatactgaaggtggaagtgatgcaccgtgtcacggactattacggccctattgtgtatagtcattttgccgatcccgaagcccgttatatgcctgacacgcagaaagaggtctataatgcctttttctgtgaactcgatacggctgttgctgtactttccgattatattgtcgagcatccgagagcttcggagtttgcgcgtttcgatatgttgttggacggtgattatgactcttggataaagtttgccaactcgttgaggatgcggcttgccatgcgcatcgcggtagccagtccggagaaggcaaaaacggaattccgtaaggcgatggataatgaatacggagtcattcgggaggcggacgagtcggtggcggtttccacagcgagtggatataccaatccgttgggcgagataaaccttgtttggaatgaagcttatatgggagcgccgatggagtccatactgaacggatatgaagatccccgtcgtgaaatctattttgccacttgccagaatgaacagtttgcaggcgagtatcgcggcattcgtcagggtacatgctttgcacataactattataatacactctcaaaattgaaagttacccagcagactgatgcagtgttgatgccggcagcagaagtctggttcctgcgtgccgaggctgccctacggggatggactgatgagtcggcgaaaatctgctatgaagaaggggtaatggcttctttccgtcagtatggcatcttgcagtccgacgcttatctggagagcaacttgttgcctgccgattttgtggatacctacgatatggagaatgatattaccgcccgttgtcaggtttcgccacgctggctggagtcagcggatagggatacgaaactggagaagattattacccaaaaatggattgccatgtttcccgaagggtgtgaagcttgggctgaacagcgccgtacggggtatccccggctattccccgtacgctttaatcacagtaaagacgggtgcatagatactgagacaatgattcgccgtctgaactttcccggcggactgaagacggagaatgccgagcagtatgccgctttggtagaggtactgggtggagatgacaatgccggtacccgattgtggtgggataccggcatcaactggtagaaacaccttatttatatagggatattttttattggatggggtgattctcggcaaaaattgccatacgttcgtccaactggtcgtactgatggtcttggataaaggaagtgcaggcacgtaatccttcctgatggcttccggtggtcaccagcgaaatggcgcttacaccgtagtacattagttcccgcgcaagttctccgctactcatgcccgggtaaccgatggtgaagtagaaaccgtcggcaacgggatcacccaaatcattgtcgtataccaagtggaaaccgtggcgcaagaagatttctttcaggcggcgggcacgttcaccgtatactttcacttcatcaaggaagttgtattgaccttcattggctgctttaagcatggcggcaagagcatactgcgcagagtggctggtgccggaagagagcgcatagagtacgcggtggatgaatactgtgccgaaggtgccgccgccgtagcgttgtgtcaacccgggataggcccgatgatacagtttgtccgaaatgcagctgacaccgatacgttgaccggcatagctgaaagctttggaaccggaaatgagcagcacgtaaaggtccgtatagtgtgccacagaaggttggtaaggcgcttggaacggtttgctcaagtcttggcggaagtccatggcaaagtaggcgaggtcttccagcacaatgacgtcatatttggttgccagttcgccgatgatgcgcaattcttcttcttttaggcaaatccagctgggattgttgggattggaatagacgatggcagagatatttcctttgctgaggtaactttccaacttcgctttcaacttgttgccacggtagtcatatacgtcaaaggtttcatatttctgtcccatcacgaccaactgctgcttctgtaccgggaaaccgggatcgatgaagagaatggtatcctttttctcatcgcactggctgcatgtgaggaatgaagcaaaagttccttgcatggaaccggtaactggtacgcaaccttcgggggctacatctacattgataaaggctttgatgaaacgggatgcttcctgcttcaaggcggggagtccgttgatgtccgggtagaggctggcaataccattctgcaatgcctccacctctgcctttacgccgacggctgagggggggagtccgggtacacccatttccatttttatgaattccacacccgatgccgcttcggcattggctgcaatggctttgacttcacggatagttgctttggcaaagtctgtgatatgaaaatctgcgatagtttcatctatcaacttacgttcaataggagtatttctcatgatttcaatattaatttagttttgcaaaggtaacataaatctcttataatcaagctatgttaaaaaaaagatgattttttttctttcaagctattgcagatataagaattttgtctacctttgcaaccgcaatcgagagagatagcaacgaaagaatgaaataatggtgcgttagttcagttggttagaatacatgcctgtcacgcatggggtcacgggttcgagtcccgtacgcaccgcgaaagcaaatatcaaattaaagcaaagctctgaaattcaaggatttcagagctttttttctgtatcggcaagaataacgattaaaaaatcatgcatgggattattcgtgggatttctgccagtcttactatactcatctgatgaacttgaactttcttgcggtataatcgggaattcgggtacaaatatccgtaaatcatatacaccttcgcttgtgctatcgcggtacctttgtcatcagaagtttaacaagaaaaatagagtaatatagcgtatggcaaaaataattttaggagttctgtcactgcttgtcataatgtcgtgcagtatcccagtgaaggagaacaccgttcaacccaatataatggaaacgaacaagaaaaatctcggaaatctgttggctctctatcccaagccgatgacggttgtcggggcggaggttgaagggaaagtaaactggctagtggtaggccatacgggtgttattggacatgaccggatactcatcagcatgagtaaaagccattacactaatcaagggataaaggcctcaaaacgactttccgtcaatctagtgagtcgtgaaatattgccgaaagctgactatgtgggaagtgtaagcggtgcgacggtcgataagtcggaggtgtttgcctaccatattggcgaaaacggtacccctgttatagacgcatcacccctcaccatggagtgtgaggtggtagacatctatgaaactgaaggtttcgacaatttcatttgtgcgatagtcaatacatacgctgctcctgaagtgcttgataataacgggaaacttgactatacgaagctgaaacccgtattgtttgaatttccgacctattcctaccttgccacgggagagattatcggcaaatgcctgaatctggataagcagccgggtatgtgcgctaaagagccgatgagtgctgacggtatcgtgcggttgtcgaaaatcgaagtttatccgcagtatctcgacgaatatatgaaatacgcaaccgaagtaggcgaaatctctctgcgcatcgaatcgggcgtgctgactatgtatgcggtcggcgagaaggagaatccctgcaaggtgactattctcgaaacctatgcgagccgtgcggcttatgaaaaacatattgcatcagaacactttcagaaatacaagcaaggaacgttgcacatggtcaaatcattggtcttgtctgaccagacgccacttaatccggctaacaagctcaataacttcatgcaataaatagaacgactatgaacaagatttttttaatttcagtattcagcattttaacactcaatattatggcacaagaaaagatagtacagacagcaggacgtacccagttgggtgagtttgctcctaaatttgcggaactaaacgacgatgtcctctttggcgaggtctggagccgcaccgacaaactcggtctgcgtgaccgtagtttggtaactataacttctcttatcagtcaaggaatcacggataattcgctcgtgttccaccttcagtcggcaaaaaagaacggcatcacccgtacggagattgctgaaatcatcacccatatcggtttctatgccggttggcccaaagcgtgggcagcgtttaatctggccaaaggcgtatgggcagaggacactgccggtgaagataccaaagccgcgttccagcgtgaaatgattttccccattggagaaccgaacacagcatacgcacagtacttcataggtaacagctatcttgctcccgtttcacgtgagcaggtttccgtctctaacgtcactttcgagcctcgttgccgcaataactggcacatacaccgtgctactaaaggcggtggacagatgcttatcggtgttgccggtcgtgggtggtatcaagaagagggcaagccggcagtagagattctacccggtacggttatccatatccctgcaaatgtgaagcattggcacggtgctgcttctgatggttggtttgcccatcttgctttcgaagttcccggtgaggatacttctaatgaatggctagaaccggtgacggatgaagaatacgataaacttaaataggagaaactatgactacgaacgaattcaaagaatatgtaaagacgcgtcaagcgcttaatacggaggagatacaccgttttatggacgaaatgagcagtgaagccaggcgtatcactttccggctgaacaccgcatactatacgccggacgaagtacgtgagttgctatccgaattgttcggttatcaagttccgtcatcgttccgagtatttccgccgttttatgccgatttcgggaagaatataacagtgggcgaaggcgtatttattaatgcctgctgtcattttcaagaccatggtggtgtgataatcggcgacggatgccaaattgggcataatgtagtctttgcaacgctcaatcatggtttgcctccggctgaacgccaaactacctatccggcaccaattgtactgggcaagaatgtctgggtaggttctaatgcaacaattcttcaaggagtgacaattggtgacaatgctgtggtgggagctggagcggtcgtgacgaaagatgtggaagcaaatacaatagtaggtggtgtccccgcaaaattgataaagagaatagaataataaaattgaaaacaaggtgaaaataatatcaaatacagcatttggcggagaaagacctttgttcgaatcgcatgacttacgtttggagaatgtagttatccgtgctggagaatcagccatcaaggaatgcagcaacatcgaagctgttgattgtcggttcgaaggaaattatcccttctggcatgttcacggatttgttatcgaccgttgttttttcgatgtcggcgggcgttcggcactgtggtattccgaccatctgaaaatgactgatacgcgtatcgatgcacccaaaatgtttcgcgagatgcacgacatcgaaatagagaatgtagagataaacgatgccgatgaggtgttctggcgttgtaaaaaactgaatatcaaaaatctgaaactgcatggaggaacttatccgttcatgttcagcagcgacatccgcatagacggattggaaagcgacagcaagtacgttttccagtatgtgaagaatgtggagttgcgcaatgccaaaatcactacgaaggatgccttctgggaggtggagaatgtgacaatctacgattctgaactcagcggcgaatatctcggctggcattcgcacaatctccggttggtgaattgccatataaccggtgagcaaccgctctgctatgcccacgacctcgtactggagaattgcacctttggtcccgactgcgaccgggcttttgaatatagttcggtgcaggcaaccatcaaaggaacaataggcggggtgaagaatccacggacaggctgtatcactgccgaaagctatggggaaatcattctcgacgaaaatataaaggcgcctgccgattgtgagttgaggctttgggatggtaactggatttataaattatgaaatacgatttcgatacaatcatctcgcgtcgcgggacgaattcttataaatgggatattcccgaagaggagaatgtactgcccatgtgggtggcggatatggattttcgtacagcacccgctattatcgatgccttacaaaagcgggtggcgcacggtattttcggttatacaaaagtacccgaagcctattatgatgcggttgtccggtggttcgatgaccggcatcgctggcaggttgattcccggtggattatctatacgagtggtctcgtgccggctctgtcagccattatcaaagccttggccatgccgggtgataaagtcatcgttcagactcctgcctataattgtttctattcatctatccgtaatgacggatgcgagttgtttgccaataatctcatttatcaggatggccgctacgtaatcgactttgccgatcttgaaaggaaagcttccgatccgaaagcaaaaatcctgctgctgtgcaatcctcacaatccggtcggacgggtctggactccggaagaactgcagcatataggtgatatttgtttacggaatgaggtgtttgtcgtggcggatgagattcattgtgaactgacttacgaaggatatgactacacaccctttgcctccttgtctgaacgctttttgcaaaattccgttacttgcgtttcgccgagcaaggcgttcaaccttgccgggttgcaaatcgccaatatcatcgcagccgatgaagaggtgcgccgccgtattgacagagccatcaatatcaacgaggtatgcgacgtcaatccgttcggcgtaatcgccacaatggcagcttataacgaaggtggggaatggctcgatgccttgcggaaatatctgcgggggaattacgaatacctctgccgctttttcaaggaacggttaccacaatatcccgtgttgccactcgaaggaacttatttggtttggatagactgcagtgcctctggtatcaactcagatgctgtcgccttgcgtttgcaagaacaacagcacttgatggtcaattccggtacgatgtacggtcccggtggagagggctttatccggctgaatatcgcttgcccccgggctctgcttgctgatggactggaacggatggcccgtttattctatcgtgaagtcttctgatttaaatccgctgtaatacctaccggcgaaggcggtgaacttcaggacacaataatcgggatcagtcactccttcggggtagtacatagtgtcgccttcctgccatatcatttccttactggtgctgtccgtcagtatctccatcgtgccgcgcagcattacgcccttgaagaagcgtgtgttgcagacgtaaaggcatgcccggttatttttgagaaattgcgaaacgcgcatcgacgaggtgttcgttgataggtaaatgtgtttgatcccttcccttttgcgggtttgcaacatggccttgatgttgggaaagccttcggcatccatcgaaccgacaaagatggttttttccttgtcaatcatgtttcctactgttttttctgcatttctcattgtttgtttttttatgggttattgtttcaagggcaaagatagccggtaagtggaacttttgtacaataaaaaagaaggaggatatgtcacttttcacggtttctccattttccggtaggcgaggggagtataccctatacattgtcggaaactacgtacaaagtaggagacggttgagaaatgaagttcagaggctatttctgaaatggggaggtcggtgtaggtgagcagacgctgggcttcgtctgtaatcttgttgagtatgtactgcttggcattgatgtttatggccgaagagaggatttcgttcagatagttgggagtgatgcatagtttatcggcatagaattgtacagaatgctgctcccggaagtgctccccaaccaattcgaagaatcggctgaggtggaagctgctgatatctttatgtggctccttacccgtctccggagggatagaggtgcggtaggcacggttgagtagcatgaggacttcgtaaagtaaggcgcgtaatatgcccgtatcgtgtgggtggaaagagtcgatttcgacctttatgtcgtgcagaagttggagtatccgtgcatagagcccgttcggcagttggagtttgtctgccgtttttcccattcggaagaacgggaggtgctgcacgaatagtgggtctttgaagaaagaggtcaaaaaggtatcctcaaaaattagagcatgaccgttgccgatacggtctgtgtcccaactgcgcacctcacctggtttggagaagaatacatcaccgggagctgccaagtgtgtccggttaccgatagtgaattctccttctccttctgtgatgaaggtgatgtcatagtaggtcagaatatgtacttttccctgggtcaagaatttccgggtatactgcaaatcaacgacatctatcagaagttcgcttccgtacttagttttgtagaaattgtatcgtgggatggcatttttcatggcttaacattgtatgatggcagtaaagttagagaaaaagctgctccgtacaatagcgaataggaaaatgttgggtaaagaccgggagttttgtttatctttgcacccgcaattatcaatcgccttgcaacgattgtctggaattatcatattatgaaacagaaacgaataccattggtgggcagacaataccttgtgcccttcattttgattacctctcttttctttttgtggggatttgcccatgccattctgaatgtactgaacaagcactttcaagagatactggatatcacgaagacacattcggcctttatacagatgacgatgtatatgggatacttcattatggccattcctgcaggacttttcatcagtcgcttcggataccgccggggtgtggtattcggtctgttgctctacggcatcggttcgctgctctttatccccgggcagcattatctgtcttttaatcttttcttgtttgcattgttcgtgataggctgcggactgacatttcttgaaactgccgccaatccttatgccacagaattgggcgcaaaggaaactgctgccagccgactgaatttcgcacaatccttcaatggtctgggatgtatctgtgcgccggtactggctggactgctactcttctcgaaggatgggcagacgggctcgggtaatgtcgcattgccctatatctgcatgggggtaattgtgttgctggtagcgctggtcttttcaagaatcaagttgcccgagattgaacatagtgtggaggtggacgaagctggtaataaggtcggattgtggtcacaccggcttttcattttcgggctgatagccttgtttgcctatgaggtcggcgagatttccatcaacagcttcttcatcaattacgtggtggagcagaattggatgaatgcccgcgaagcttccgtagtgctttctttcggtggactgggattatttatgttgggacgttttgccggtagctggattatgggacgtgtgcgtgccgagaaaatgttgctggtgtgtgctacggggacagtagtgactacttcgttggtactgctggatgtagggatgatatcgcttgcagctctgttgtgcggatatgcgtttgaggctattatgtttcccacgatttttgccctttccttgcgcgggctgggcaaccataccaagagggcttcctctttcctgatgatgtctcccgtgggaggcgtggtaggtccgctgttgatgggactggtggcagaccatacgacgatggtgtgggcgttcattgtaccgctggttgcctattgcgtggtatgggcatatgctcgcaagatggtgtccgtctctaccgcttcctcaatatagaaggaatcctgcgattccggcaaggattatcagtaagatagggtgaaggtgccacttccacgtcacgccgaaagcggctgcaaagataagtatgcttttgtaatctatgaaattttccttgttcatcagcaatagggcagcagcagctatcaatgatacggacatgggcagtagtccagacattgccgccttgatgtatttgttgtctttgcatttcacgaagaagtaagagatgagcaataccaggatgaacgagggaaggcatactgcaacggtggccacgacagctccccacacgctttgagtaactgcatagcccacataggtggcactgttgatgcctatcggaccgggcgtcatctgcgagatggccaccacgtccgtgaattgttgcagggtgagccagtgatggtggtccaccacctcgtattggatgagggacaacatggcgtaaccgcctccaaaaccgaacattccgattttcagatataccaatatcagctgccaataaatcatatctgtaattttctcagtttatcttttaaccataatgtatagagcattcctcctgcaattcctgcaaggacaatgtatacgggggatagcccgaattgccagatgagtatggtggcgatggctggaagcaccggttgccaatacttcagcttcagcgcccgtgcagccgaaatgcagggtatcacaatcagtgcgactactgccggacggatgccattaaagatgcgtatcatcacctggttgtcctggaaatgagcgaaggacatggctatcagcatcatgatgacaaaagaggggaggattgtggcaagtgcacacaccaggctgccttttactttatgcagcttgtagccgacgaatatggatatattgacagcaaaaacaccgggaagtgactggctcaacgcaaacatttccatgaaatcttctttactcatccatctcttttttacgatttcccgttcaatgagaggtatcatagcgtatccaccaccgatagtgaacattcctatcttggcaaaggtcataaaaagcagtaaatatttcattatttctcttcgggtgacgttcttttgcaaagaaacccaaattaatcaacatatacaaattaggggtataatatttatttattgatattttatattgtagggctatattcttaaatctatttaaaaggaggatattccgtcgtaaataagctttatctttaacacgtaattacaaataatataaaatgtaggtatgatacagatagtgcaattacatggtacggataagaagctgtatgagcttgtagcccctttggttatgagtccggaagtactgaaacagaactacaattatcctttcaggacagcggaagagtacgagtggtttgttgctttggataataaacatgttgtaggttttgtgccagtggagcacaagaagtatgaatgtgtcatcaacaactattatattaaggaaaggaatgttgacactctgaaattgcttctggaaaaggtacttgagaagcagggcaaggagagtagcctgacggctgttagctttgtcgaagatagggatgtcttcagcgagctgggctttttggaagacaaggtatggacccgttatgtgaaaatgaagaaaaacaaataattatggctgcacccaaaaatgtgtatgaactggcacaagaacgtcttgatgtgatttttagggagtttgacacgatatgcgtctctttttcgggagggaaagatagtggagtgttgctgaatttatgcatagactatatccgccggaaccggttgaaccgtaaactgtgtgtattccatatggactatgaaatacagtacagcatgaccattgattatgtggaccgggtattggaggcgaataaggatatattggaggtgtaccgtgtttgcgtgcctttccgtgtaacgacttgtacgtcgatgtaccagagctactggcgtccgtggcaggaggatttggaggacatttgggtgaggaaaatgccgaaaggctgcctcactaaagagacgtttcctttctacactcccgaaatgtgggattatgagttccagatgcactttgccaaatggctgcatgagaagaaggacggagtgcgtgcctgctttctcataggcatccgtacgcaagagagttttaaccgctggcgcagcattcatctgaaccggaagtatcagatgtaccacaattaccgctggacctcgaagataggcaatgacattttcaatgcttatcccatttatgattggaagacgacggatatctggacagccaatggtaaattcggctttgactataaccatttgtatgacctatattataaagccggggtcaatatcgaacgccagcgtgtggcaagcccttttctctgtgaggcacaagagagcttgaagctgtatcgcgtcatcgacccgaatacttggggaagaatgatagggcgggtcaacggggtgaactttaccggtatttatggagggacgcgtgctatggggtggcaaacggtccgactgcccgaagggtatacgtggaagggctttatgcagttcctgctttccaccttgccggaagagacccggaggaactacttgaaaaagcttaccgttagcattgaattttggcgtacaaagggggggtgtctggctgacgagaccatccagaagctgagggatgcaggagtgtccatcgaagtgataaataccacgaattacaagacgaacaagaaaccggtgcgcatggactatctggatgatattgacatcgcggaattccgggaaatccccacttataagcggatgtgcatatgcatcctgaagaacgaccatgcctgcaagtacatggggtttgccttgaacaaggaagaggcatacaaaagagacaagataatggaacaattcaaaaatatgatgttatgagcgtagataaaagtccggtatataatgtaaaggcaattccaatagagaagatacaagcaaacgattacaatccgaatgtagtggcaccgcccgaaatgaagcttttggagctttccatttgggaagatggtttcaccatgccttgtgtctgttactatgatgaggaagcggataattacatcctggtggacggctaccaccgttatcaggtgttgaagacatccaagaggatttatcagcgcgaaaacgggttgcttcccgtggtagtgattgacaaggaactttccaaccgtatggcatccactatccgtcacaatcgtgcccgtggcacgcacaacatcgagttgatgtgccatattgttgcggaattggacagagccggcatgtcggatgaatggataatgaagaatatcggaatggatcgcgacgaagtattgcgtttaaagcaaatttcgggtttggcagacttatttgcgaacaaggacttcagcattccggataagaaagaagagtatatgttggataaataaatgaatgtttcaggggtggattttttaatctgcctctttatattcattaataagtgaaatatttcgttgcaaacttgcataatttagtcaaatcgcctacatttgtcagcatcaaaacaaacagaataggtcttatgtgctttaaggcactataaaaaacattacatgaagaaaattttggttagtggtggtgctggttttataggttctcacctttgtacccgattgataaacgatgggcatcaggtgatttgtctggataatcttttcaccggttcggaaggaaatatcactcatctgaagagcaatccccgctttgagtttgtactgcatgatgtggaaaccccttatgatgcagatgtggacgaaatctataatcttgcttgtcccgcttctcccatccactaccaatatgacgccattaaaactatcaagacttctgtattgggcgccatcaatatgctggaactggccaaaaagacgaatgccaagatattgcaggcctctaccagcgaagtgtacggtgaccccgttattcatccccaagtggaaagttattggggaaatgtaaatccaatcggcctccgttcttgttatgatgaagggaagcgttgtgccgagacattgtttatggactatcaccgccagaatggagtgcggatcaagattatccgtatattcaatacgtacggtcctcggatgctgccgaatgacggacgggtggtttccaatttcgtggttcaggcattgcagaaccaggatattacgatatacggttcgggcaatcagacacggagtttccagtatgtagatgactgtatagaaggtatggtacggatgatgaatacggaggacgattttatcggtccggtaaacttgggaaatccgaatgaattctccatattggaactggcggaaaaggtcatcaggttgacgaattccaaatcgaaactgattttcaaaccattgcctcatgatgatcctaaacagcgtcagccggacatcactctggcaaaggaaaagttgggctgggaaccgactatagagttggaagagggtttacagtatataatagagtattttaaggaatatcgttcctaactaaatagtgattttgataacgggaaaaacaatatagaaagatgaacatggaaataaatccttccgaatacaagatcctcatcgttgacgatgtgatgtcaaatgttttattgttgaaagtgcttttgacaaacgagaaattcgcaattgctactgcgagtaacgggcggcaggcattggagcaggtggaaaaggaaaatcctgacttggttttgcttgatgtaatgatgccggacatgagtggttttgaagtagcccaacatttaaagtcaaatccgcagactgctgaaattccgatcatctttctgaccgcactgaatagtacggcagatattgtgaaaggctttcaggtaggagcgaatgacttcatctctaaacctttcaataaggaggaactgattatccgtgttacccaccaaatatctttggtagctgccaagcggctgattttgagtaagacggaagaactgcaacgtaccattgccgggcgtgacaagctctattcggtgattgcccatgacctgcgttctccgatgggatccatcaagatggtgctgaatatgctgatattgaacttgccatttgagaaaataggtgctgaaatgtacgagcttctgacgatggctaatcagacaacggaggatgtgttctcattgctggataacttgctgaaatggacaaagagtcaaatcggtaagttgaatgtggtttatcaggatgtggatctcgtcgaagtgacagacggtgtcattgagatttttagtatggtggcaagtctgaaaaagataagaatccgcgagatgaaaccggagagaatgatggttaacgctgatattgacatgctgaagacggtagtccgcaacttgttgagcaatgccatcaagttcagcaaggagaattccgaaatattggtgaagatggaggaagtgaatggtatggcagttgttagtgttcaagatcatggctgtggcatcagcgaggaagggcagaagaaattgttgcatgctgatacgcatttcagcacgttcggtacgaacaacgaagaaggctcgggactgggcttgttgctgtgcaaggattttgtcgtgaagaatggcggtaaactgtggtttacttccaaggagggcgaaggctccatattcagcttctctattccggtgaagtaatgataacgaagaaaatagaacggatggtccgttgaagtaaaacagaccatccgtcagactcaaatagaccgtctgtttcttatgaacggatggtctgtttttttatctcttacacagactgcggaaatcgcaatattcacatttccgggtatcctctgtttggctgaatgtttcttcttggctgaatatctcctgcaggagtccgtgcagccgtttgcggaactcgtcttcgaagaaagcgaagttgttgaccggtaccttgggttgtcgtggcgctcccatttcgatgatcggggagtagctttcggaagctgcccggtggatgtagagcagggaaggggctaccttcagcgattgcttgcggcagaggatggcggcgtacaaaaacgtctggaaaatatagttgggacgattgtcggcgggagtaaacagttgttctatattttctggagtcttgggagtaccgcctgtcttgtagtccacaatacgtagcgtgtctcctttgctgtccaggcggtcgatggtaccgcctatctgtaaggcaagctttccttgcggagtatctatttccatcgtttctctgacgtcctgttccatgccctccatacggaacggggcatattgcaggtcattgcgcaggagctggcgcaggtaagaggcgatgactttggaatggatgagctgcgtaccgttatactccggttgctccgtaaggggcacatggaagaacttttctttgaaagcattgtccacataggcttgcaggcgaacatcgtctttcagtaattgttccaggtcatctttacgtatctcccgtccgttggctatcagttcgttgtacaccagttcggcagaacggtggaagatggtgccgaagagggcggagtctatctcggcgcttacttcatcgggagctttcaggccagctacgtatcggtagtagaatttcagccggcagtccagataggcattgagggcagagggggagaagaacgcttggggacgtcggtggatgtcgtaggcatcgaacatctgttgcaacatctccggtgtcttgtgaatctcaatttcccgggcttgctggggggattgtccggcttcaaggtactcaagggagatgttgtgtggcgattctaccaggaattgcagcatgaagcgggacatttccccgcggttcagtccgtccgaagaggtgttatataataaggtgacgttttctgcccgctggatgaggcggtagaagtagtaggcatagacggcatttttgtgctctatggtggtcatgccgaaggctttccttaggttgtaggggatgaaggaggactcgcctccggctttgggcaattgcccttcgttgagggagagcatgatgagattgcggaagtcgaggttacgcgtttccagcacacccattacttgcatgccgatggcgggctctccgtggaaggggatgttggcagaggtaagcagccggttcagcagtcgcttcagcgtgtctgtgcgcaggctactcagttccccggtctctatcagattgagcaggcgattgacgagagtgtaacttttgaacagagactcacggtacagctggttgaagatgtcttccacgtctttttcctggcggtagaggacggctacttcgcgaagcagttcggtgaggtagctgcatagggcggcgatgccgttctgtggtgtaaagacttgttcaaggaatgcgtcctgcttcagctccgagggaagaggatagaagcgattgtcctgcgtaagccgtctttccagtacttcggcatgggaggaaagctgccgggtataaggatgtttcagcagggtgagtacggtctcgtaagtatatcgtccggtacctgtgtggtagccggtagtctgtagttctacaagggcgttgatgaagctgtataccggagtttgggcaagggggaatcccattgtgatgttgacgttctttacctctgccggaatggagtggaggacgggaagcagtagggattcgttgcagaggacgacggcagtatcctttaatgaagattcttcatttctctgtttttcgttctccctaatccattgaggcaagtaacgggcttgtgcattttccgtagaagcggagataaagcgtacattcttgggtttccgcagtacatcaaaggatttttcggggagctggttggggaacagctttaggttgcggaggatgaattcgcctgcttcgtgggtatagggtggtttttgttcgcgtgggaggcgggtgtagaatacgtcatagtcccaatagaacatcgcttttccggcattctgcaagagctgaaagaaacgggtttctactctattcagcacgttgaagccgacaaatacatagcggtcgtagcgtagtcggtcggtgttgagttgctccatgacattgcggtacatcatgccttcgtaggcgatgccaagttccgtgaggtttcggcggtagtggcggtagatgtcgcccaacttatcccagagggagatgaattttgctttcagctccgtgcgcttttctatggagaaattttggaagaattggcggatggcttcttcctgctcttggtcaaggaagtcgtagccgtccatgatgttcttcagttcctgcagattgctgaagagcttgtcggcatctacgaggtttttgtccacgtcgtcgaagtcgctgatgagcagttctccccagaagtagaagtcatccagagtctcttcactgtgggtctcttcgcggaacaccttatacagttcgcataccaggcggatggggtcaccggactttagtggcgagagttgccggaatagttcgctgatgctgacgtaggcgggcgaccacaaggggcggtccgtttcggctgccaggtattcgttgaagaacagactggcacgtttgttggggaaaacgatggcggtgcgcgagaggtcgtttcctattttggcgtaaaggtcgtgggcgaccagttggagaaatgttttcataattcagttgataattgatagttgatagtggatggagagtgagtttataccggttctatgttgttctcctctacataccacaagtagccccgtatattttctgcggcataccccatgcggaccagcagttgcatgtatctctgtacttgcttgttgtacttcttattcggctttccgaacttgaagtctaccactacgatttcttcaccacgcatcatcacacggtccgggcggcgtgtccgcagttcgccgttttcctgccagatgatgtcgcattcattgaacagccgccacgtccccgaataccagtccttgacttggggcagggagaaggcgcgttcggtgaggtcgcgtatttcttcttccgtctcacttcgtccaattactccttcaaagacgagctggctgatggcattgtcaatatcttcttcggtttcgatagcagagaataaggtatgcagcaaacgtccccggttgatgaaacgctggctggattctgcttcgtccactcctgctatgaagtctgccgaacggttggattgccggaactcgatgtcgtggagcatactctccatgtggacgggcagtttgaccggcttttgcgaaagtctgttgaccggttgctgttcataaacctcaggtttacgttcgcagtatagaggtttctgttcgtagcatagaggtttggcttcgtcatcagtagggttgtctgcgtcatgctgtgagacggggatggaggagagacaaatcttgccgttctcgtatatggcagcttcttcgtcccaactgcctgctccgtctttggctatgcggggcaaggtgttggcaaggagttcggacatggttcccttctgttccttccggctccagaggatgaggttcttgccggcacgggtaaaggccacgtacagcagattcagattgtccacccatagctgaagccgttcgtgcagatagtcctgccggtatatggattccgccatggtggtggaatagttcaccggcactaagctgatggcattatagggctcttccggtgggatgcaccacaccagctggttgttggtttcgttctccagcttccagtcgcagaagggaatcagtacggtatggaattccagtcctttggacttgtggatggagaggatacgtataccgtccatctcaccgctggggatggtcttgctgcaaagggtttcgtcccagtagcggatgaagctgtccagctcggaagaattgctttgcagatactccgtcacagcatcgaaaaaggagaagaggtaggcatcctgcttttcaatgcagctcatggtgaagatgctgaacagttcttccagtaactcatacaaaggcatcaggcgcagcgtttcccgtcgggaggtaaaggcttcgggaaggggagtggctgttgtgaattccggttgctcgtcatttgtcatttgtaatttgtaattctccatcagtgcagcctccgcaatcttgttctccggattcgacaggcagcgcagggcatccatcagcatgcagatggcaagggaggcatccagacggaaagcttcgtcggacacgacagagagatgcagctctttgtcgaaatagtcggctatcggtgggatattcttgttcttgcggacaaggatagtgatgtcattcagtgttacgccctcttccagcagccgctgtacttcttctcctaaggcgagaagggtctgctctgtatagttgtgttcatcgtccggttcaaggaaggcagcttttacgtagccgtactccgtgttcttgggcgattcctgcactacgtcggcataagcgcgtttcaggggtaggcaatcctctttcagttcgttcaggtgtagcgcattgaggtagtctatggcagcggtaaatacttggttgttgaaacggataatgttggtttcgctacgtcggtttgtttttagggtttccacacggacggggaagttgtttaatggagaacttgattctctattctccattttcaattcttcattgcctaaactattcagtattccccagtccccgttccgccagcggtagatggactgcttcacatctcccacaatcagactgtcggctccttgcgaaagtccttcgagcagcagcaggcggaagttgtcccattgcatgcggctggtgtcctggaactcgtcaatcatgacgttgcgtatgttggcgccgattttctcgaagacgaacgaagagtcaccctcgcgcaccagtttgtgcagtagggcgttggtatccgagagcagaaagcggttgtgctcccggtttagcgtgcgtacctcttcgtcgatatgattgagaagttgcagtttgttgaggtgctggagcgagaggcggcaactgtttagggtacggttgcgttgcggacgcattctttcggcttcctgcagtagaggcatcagactggtttctgccagacggatgatgtcgtcctttcgtgaggatgttttcgttgcccagttttttgcatctgtcaggctgttttgcagggtggcgttcagcacatccttgtcagaaagtctgccatcgcgcagcttgcggaagtaactgccgatacctcgggcacctcctttcaagtcttcgggagtaagggcatgcccttccagttcgccctcaaactggtcgtagaagcttttcatctgttccagagcctcggtttccatatcgcgcagcacatcccggtagagtttcagcgtattcggagtacgcaggcattgccgtagtttttcaccgcgttctatgtagctttcatcgaagatatttcgtccgaaacttttcacctcgttcgatacgttccagcgtttgtcgtcgcggatacgctcgtcgatgtagtccagtagccacgccagcacgagagaagtgggggtaagtttttcgatgaggctgtctacggcatcactcagcacttcactgttgttcagctctatgcttaggttaggacttagttccagttcgcgggcaaggttgcgcatcacggattggaagaaggagtcgatggtttccactcggaaacggctgtagtcgtgcagcatgtattgcagtgccatgccggcccgttggcggatgtcttcgtccgtcaacagccgattgtttccgtttcccgccttttcatcttttatccttaacccttcatccttaatcctttccaaatacgctttcgatgcgggttctcccttccagatgccgtaaagctgtgtcagtatgcgctccttcatctctgccgtggccttgttagtgaaggttacggcaagtatctgccggtaggcgcgtggattgattatcaaatgcttgatgtattccacagccagcgtaaaggtcttgccggagccggcggaggctttgtatactaataattccatgtaagttgctgcattgagtatatatctgcaaacgtacataaaaataatgaaaaaatgaatgcttccctgctttctcttaatagaaataagtggggaagcatccgttatcaagaggctatacgtatggtctatactacattaccggtgtctggaataggaatacaaaccccttgctgtctttcaaatcttttacggcatctcctgcatagatttctccgttcgtcagcgaaagcttcttgatgcttgcattcggactgaaatcaattttattcaggtcgagccagaacaagttgggagtcatggtagattcaaaataatatactttgtttttctggtcggatacagaacgccaacgggtggaggagatatgaggcttgtccggtgtggtgataccgaacggtacagaaacattgcgcattacgctcaatacactgggtacggcaatctttgcatctgctgtttgcggaatggcattgatgtagaatgatgcgcgtacaaagcggtcgctggagcggttggttcccggtaacatattcagtccgcctacctctttccaatagtcgttgatacccagctggagttcatatttgggagagttggtcattacttgatactgctttccttcatgtatctcaaggtttccgtctatgtattccaagacagccgtgtttccggtttcatctgtgatggccagatgcagggtggaagcggcaccgttgggcaggtccggtgcatcaatgcggaaggattcttttttcagttcatccacagcttcgcgtacggttgcaaaattgtcgagtacgtattgcgtccagatactgatgcccataatcgggcggttgtcttccgggcgatggtaaacggactctggaaggaagagcaggctggcaaccagacctttctcgttcataccgtcgcaggttcctatgtcataaccggtggcaatgacactgccgtacctggaagtccagttcaccgtatttcctttgttgtaacctgccctctgcatgcctcgtgggaatacatagatgttactcataaggtcttctttccagtccatcgtacgtcccgtaatgactgtattgttaggaccgatgtaggtggcgcgggtacacgcttctgtttgttgtacattcatggcggctatggcagccagtgcaacagctattgtctttattggtttattcatctcgcttttgtttttatgattaatactctgtttcatagagtaacaaaaggagaggagtatagtttgaggaaaagaggtgaaattccttactcgtctttttctttcagcaattcttccattttcagtacttcgtcacggtactgggcggcttcgataaagtcgagcttcttggcggcttcctgcataagcttcttggtacgttcgatactcttttccagttgcttgcggctcatgtactgcactatcgggtcggcagccagcgtagatgtactttcttgttccacatagggacggggggcactggaagtgaacttctcgccgctgaggacggcttcgccggcagcctcgttggtggcaaacacattgaggttcttcgctttcttgatttgctggggcgtgatgccgtgctcttcgttgtacttcaactgtttctcgcgacggcggttggtttcgtcgatggtcagttgcatgctgtccgttatcttgtcggcatacatgatgaccatgccgttcacgttacgggcggcacgcccggcagtctgtgtcagtgagcgatgggaacggaggaaaccttccttgtctgcatcgaggatggcaacgagagagacttcgggcaggtcgaggccttcacgcagcagattgacgccgacaagtacatcgtaaacgccttcgcgcaagtcacccataatctttacacgctccaaagtatctacgtcgctgtggatgtaattacacttcacgttgttgttcagcagatattccgtcagttcttccgccattcgtttggtgagggtggtgacgagggtacgctcgttcttctcgatgcgcagctgtatctcttccattaggtcatctatctggttgtggctgggacgtacctggatgatagggtccaagagtccggtcgggcggatgacctgctctactacgatgccttcggatttcatcagctcgtaatctgccggtgtggcgctgacataaatcacttgcttggccatctcctcgaattcatcgaacttcagcgggcggttatccatggcagccggcaagcggaacccgtactccaccaggtttatcttgcgggcacggtcacctccatacatggcacgtatctgcggaacgctgacatggctttcgtcaatgactatcaggaaatcttcggggaagaagtccagcaggcagtaggggcgggtaccggcagcacgtccgtcaaagtagcgcgaataattctcaatgccggagcaatgccccaattcgcgtatcatttccatatcgtaggtcacccgttcctgcaagcgtttggcttcgaatgggcggccttcgttttcaaaccattgtacctgcttgtgaaggtcgtcctctatttcgtggatggcacgtaatgtggcttctttggtggtcatgaagaggttggcgggataaatcttataagcgtcgaacttggcaacagttacgccgctcagagggtctacctcttcaatgctatccacctcgtctccccaaaaggtgacgcgcagcaggttgtcggcgtaagccagataaatgtccaccgtatcgcctttcacgcggaagttgccacggttcaggtcaatgtcgttgcgtacataaagactgtccaccaagcgtcgcaggaagacattgcgactgaaattcttgccttgctgcacttcgatgacgttgttatagaagtctgccgggttccccatgccgtagatgcacgaaacggaggataccaccactacgtcttttctgcccgaaagcagggccgaggtggcggcaaggcgcaacttgtctatctcgtcgttgatggcaaggtctttttctatataagtgtccgaagagggcagataggcttcgggctggtaatagtcgtagtaggacacatagtattccacagcattgttcgggaagaatcctttgaactcgctgtacaactgggcggccagcgtcttgttgtggctcaatatcagcgttggtttgttgatgttggcaatgacgttggctatggtgaatgtctttccggacccggtgacaccaagtaatgtctgtgcgggaagcccctcgcgcacgccttcggtcagctgtgcgatggcctccggttggtcaccggtgggctggtaagcggatgtcagttcgaatttgttcattttctcttcttagaagcggcaatattcggtaaaatctttgagataaacaaaatttttttgtttactttgcagctatattgataataaccattaataattgtaatacaacgaaaaacatgatttggaatgaaagcatcgaatgcatggaccgcgaaagccttcgtaaaatccagagcattcgtctcaaaaagactgtggaacgtgtgtatcatgacactcctttttaccgtaagaaaatgcaggaactgggaattactcccgatgacataaacagtatagatgatattgtaaaactgccttttaccaccaagtatgacttgcgggacaattatccctttggcctctgtgccgtacctatgagccagattgtgcgtattcatgcctcttccggcactactggaaagcccactgtagtaggctatacccggaaagacctttcagtatggtccgaatgcctttcacgggcctttaccgcctatggtgccggtagttcggatattttccaggtgtcctacggttacggacttttcaccggcggactgggtgcgcatgccggtgccgagaatatcggagcttctgtcatcccgatgtccagcggtaatacagagaagcagattacactgatgcatgatttcggttctaccgtgctttgctgcacaccctcatacgccctctatctggcagatgccatcaaggactccggccttccccgagaagatttcaagttgaaaataggagcctttggcgccgagccatggaccgaaaatatgcgtcgggatattgaaataaagctgggaatcaaggcttttgatatttatggacttagcgagattgccggtcccggtgtaggttacgagtgcgagtgccagcacggcactcacctcaacgaagaccattatttccccgagattgtagatccgaagaccctcgagccggttgctcctggccagaccggcgaattggtgttcactcaccttaccaaagagggtatgccgctgttgcgctatcgtaccaaggacctcacggccttgcactacgataagtgctcctgtggacgcacactggtccgtatggaccgcattttgggacgtagcgatgacatgctgattatccgtggtgtcaatgtattccccacccagatcgagtctgtcattctcgaaatgccggagttcgaacctcactacctcttactggtagatcgcaagaacaataccgataccatggagttgcaggttgaagttcgtcccgaatactattccgacgaaatcaacaagatgctggctttgaagaagaagctcgtagcccgcctgcagagcgtactcggtctcggtgtagatgtccgtctggtagaaccacgcagtattgagcgcagcgtaggcaaagccaagcgcgtcatcgacaaccgcaaattgtaattgccaaattgtaaattgtaaattgtcaaatagtaaatgaacctatggtagcaaaacaactttccatttttctggagaacaagtccggccgcctcacagaggtgactgaagttcttgcaaaagaaggtgtcaacctttctgctctatgtattgcagagaatgccgatttcggtatccttcgtggtattgtttctgaaccggataaagcatataaagctttgaaagataatcacttcgctgtgaatgtaacggatgtggtaggcatcagttgtcccaatattcccggctcattggcgaaagtgctccgcttcctctccgatgaaggtgtcttcatcgagtacatgtattcctttgccaacggtgaaacggccaatgtcatcatccgtcctaacgacatggataactgcatccgtgtattgacagaaaaaaaggttgatttgctggcggcaagcgatttgtataagctgtaaaatgtaaaaatagtgattagcgattagtggttggtggttgcgctattactccgcatggcactaatcgctaatccctaattcctaaccattaatccttatttcctgcccgttcgtctggtttttgaaaaattaaggctcgtatcgttgctttattcgatgcgaacccctatctttgcgcattatttgaacaaaagtaatgaagaagaatatcctaataactctgcttgcagcattgctgctctcctcgtgtggagaatacaacaaattgctgaaaagcacagattacgaatacaagtacgaagcggcaaaaaattacttcgcaaaaggtcagtataaccgtgctgccactttgctcaacgaattgattgctattctcaaaggtactgataaggcagaggaatccctctatatgctgggcatgagttactataaccagaaggattatcagactgctgcgcagactttcattcaatactacaacgtttatccccgtggtacattcacagaactggcacgtttccacgccggtaaagctttgtatctggatactccggagccgcgtttggaccaatccggcacgtatagcgccatccagcagttgcagatgtttatggaatacttcccgcaaagttccaagaaagaggaggcgcagaacatgatatttgccttgcaggacaagctggtgatgaaggagtatctgtctgcaaaactttattataatatgggtaattatctgggtaacaactatcaggcttgcgttatcactgcgcagaatgctttgaaggattatccctataccaacctgcgtgaagatttatccattcttatcttgcgtgccaagtatgagttggctgtatacagtgtggaagacaaaagggcagaacgttaccgcgaagctgtggatgaatgttatgcctttaaaaatgagttccccgaaagtaagtatatgaaggaagtcgaccgaatctttaaggaagcacagaaaatgctgggagaaggaagtgaagagcaataatataataatacaatagataaatttatggattacagaaagacaaatgctcctactactacggtgacccgtgatatgatggagttgtgtgaggataccggtaatgtatacgaaagcgtagcgattatcggaaaacgtgccaaccagattagtgtggaaatcaagaatgacctttccaaaaagcttgctgagtttgcctcttacaatgataatttggaagaagtgttcgaaaaccgggaacagattgagatttcccgctattacgaaaaactgccgaagccgacattgattgcaacacaagagtatgtggagggtaagatttactatcgtaacccggctaaggaaaaagaaaaattacagtaatgatacaacgtattcaatctgtttatttgttgttggtaactatcctgttggttgtggcaatttgcatgcctgtaggacagttcatcggagcggacggagtgacggcgcatgttttcaaacctctgggagtggctttggccgacggaggatttcagtctacttggggcttgttcgggatattgttgctcagtgcacttgttgccttctgtacgatattccttttccgtaaccgtatgttgcaaatacgcatgacgattttcagcagcattctgctgataggctactacatagccttctgtgtatttatgtttattttgaagggtgatttggatgcaatgactttccagttaggatgggcgctttgccttccggtggtagccatcatccttaactatctggccttccgtgccatctacaaagatgaggtgatggtgaaggcggcagaccgtttaagaagataagaaggtttatctacttgataataacaaaaggcagaccacgtatttcattcggaatacgtggtctgccttttttatcgtttccgcttgaggttaagccgttccattatactgttcccattagaggaaattgtcgttcctacgtgtggaaacgggtgtctcctataagcattacttcttcaagtcgaagagataagttatcttggccgtaatgactccgtgtgcggagcgtgagaaaaagtctttcttggtgctgccatagaaatcggataaagcatagtagtatcttccttctacgatgaaattgcctgccttggtgcgcagctctatgcctgctccgcctgcaatgccgtagtcgaatttgttgtctatggccttgccgtgctgttccacggtgatgttggtgtaggattctgctacagtgccgtcccagtcgccgtctattttttcgctgtcgccaagcaggaaacctatctgcggaccggcatggatgaagaattgcaaaccgcggtccttgccgaatgccagatgtgccaggaacggtatttccacatagttcatggtgcgggtgtagctcagtgtgggatagtcctcgtaatactcgtcccaaccgtgttgtgagaagttcagctcgatttgtgcaccgcaaatcatactgaagtatttttcggaaatgtatcgggctgttacaccgccgttgatacccatcagattcttctgcttgacagagggagagaagcttacgctattcagattgatgcctccattgacgcccacagcgaagttgtggcgttgctcgcccacctgcgcatgcaggggcaatatacatgcacacaccagcagggcgaatatgatgattgttctcaggttcatgttataagttataagttacaagctacaagttaatagttatatagtggattatcagattattaatccttaatccctaatcaaagtccaacttcaccagctcaaagttcttggtgaagtgcacgaagaacaccttcttgttgatgaagcctccccagttgtttacccgttggaacttgaagccggtctggatgggaatcaaatccagtccctgcatgttcttctcgaaagaagagccatagcgcgcaagtcctttcaggaagaaataaccggtatcgaagcccagcattccgaatttgggatagcgctcgtccatctccttgccataccatctgcggtagtttttggtaaagttgatggcggcaggcagcaggttgttggtatagaaagaggaatagaaataggtgtccagttcaaagaaggcttccaagtggtctttggtgtaggtctgccattccggatagccgaacagatggatacggctttcgggttgttcgcgcaccaataaggtcaattggggaagtatcttaatcaatgtcaggttactgccggatgtggggataaagatattctcacggtccgtgcgtaatactgttttcagggattctacggtgacatcctctttcaagctcttcatcgggatggaacggttgcgcagttcatctttcagtcccttgatgaattctgccttgtccttggtgccctggctggcttcaatgaagatgacgttggcattggggaactggcgcacaaagtggtcgtacacctcggagtacagataggattggggggtatttatctgatagaccgccggattctggaataccgtgttgtctttcgatgtgaatggtatcaccaggcgtgtgtcttgtttcttggcaaactcggccagaggtttgatgtgctgttggtacagaggcccgaagatgatgtccatgtctttcatctcgcttttgcccaggatggagttcagcgaggcactttcgggaccagaattgtaagtgtacaagtcaatggaagtgccagtacgtttcaagctgtctacggccatcagcaggccttcgtagtattccaccatacgggaagactcgctctttgataccccgtccaggaagggaaggatgacggcagccttgatggtgctgaagcgttctgtctttttccggttttcacggaacagctcgctgtcggtaggtattgcctgcgactggatattttgctccgtctgtgctttgggatagggaatgcagaggaaggttcccttctttattttgttttcgccttttaattccgggttggcggctatcagttcggcttcgctgatgccgtattcacggctgatgctgaatacggtttctttccgcttcactttatgcatgtcacggcatcgtgactctacggggccgagaatattgttgttggcaaccacagtgctgctttgtgtctcaaccgggaccatggtttggggctcggttgtggaagggatacggattacttgtccgatacggaaattctcggcgctcagtcccgggttggcgtcacagatggctttggcagatacattgtatttcacggtcagtcggtaaagggtctcaccggtttcgatggtatggtatgtttctttttgtatgttggcagcgctgcgtggaatacgcaatgtgcgtccgatgaatattttctcgtcactgccggggttcagtttgatgatgtccgactggctgacgccgtacatgctggcgatggagtagagactttgtcctttttcgatagtatgcagaaaataagattgattctcttgtgctattgcaccgatactgcatgcactggcaagcagcagggagcagataatgcggttaatcgttttcattcagtaatcgttggtttatgtttacaatttcccaaagtagctgcaaaggtacgaatattgtggcattcaaaccaaaggattgcgttaagaaataatattgtgcatttcaaaactgaaaaatagcgcttttcggctgatattcggggggaaacagttatttttgcagttaaaacgataggataaatcaacatgcaagaagaaacagaatatatcaatgtatatggtgcgcgcgtgcacaacctcaagaatatcgatgccgagattccccgtaacagcctgactgtgattacaggcctgagcggaagcggcaagtcctctttggcattcgatactatttttgccgaagggcagcgccgctatatcgagaccttttcagcctatgcccgtaacttcctgggaaatttggaacgtccggacgtggataagataacgggactgagtccggttatctccatcgagcagaaaaccacgaataagaatccacgttccacggtgggtacaacgacagaggtttatgattaccttcgtttgttgtatgcccgtgcaggagaggcttattcttatctctccggcgagaagatggtgaagtataccgaggaacagatactcgatcttatcctgaaggattacaaaggaaaacgcatttatatccttgctccactggtgcgcagccgtaaggggcattacaaggagctcttcgagcaggtgcgcaagaaaggctatctctacgtacgtgtggatggtgaggtgtgcgaagccttgccaggcatgaagctggaccgctataagaaccatgatgtggaggtggtgatagacaagctggtggtgacggacaaggatgacacacgcctgaagaacagcgtggccactgccatgcgccaaggtgacggattgctgatgatactcgatgtgcagacggatagcgtgcgccattacagcaaacggctgatgtgtcccgtgacggggttgtcctatcgggaaccggcgccgcacaacttttccttcaattcgccgcaaggtgcatgtcctaaatgcaaagggttgggggtggtcagccagattgatattgacaaggtgattcccgaccgtgagctctccattgccggaggtgccatcgcaccgttggggaaagccaagaacagcatgattttctggcagattaccgccttgctggagaaatatgaagcaacgctgaaaacaccggtcaaagacttaccggaggatgccatcgacgagattctctatggctcggacgagcgtatcaagataaagagttcactgataggcacctcttctgattattttgtgacgtttgagggggttgtaaagtatatccagatgctgcaggagaaggatgcttctgccacggcacagaagtgggcggaccagtttgccaagactgccgtttgtccggagtgtcatggcgccaagttgaataaggaagcgctttcattccgcattcacgacaagaacatctacgaattgtctacgatggacatcaatgaactgtatgactggctggtaaacgtagacccgtatcttagtagcaagcaacagcagattgccggtgaaatcctgaaggaaatccgtacacggctcaaatttctgcttgatgtaggtctggattatctttcgctgaaccgtagttccgtcagcctttccggtggtgaaagccagcgtatccgcctggctacgcagataggttcacagctggtgaatgtgctgtatatattggatgagccgagtatcggcctgcaccaacgcgacaaccagcgcttgatacactctttgaaggaactgcgtgacattggcaactccgtcattgtggtggagcatgacaaggatatgatgctcgccgccgattatgtcattgatatggggccgaaagccggtagactgggaggggatgttgtctttgccggtactccccgtgaaatgctacggacgcatacgctgacttcccaatacttgaatggtgagcgtgccattgaggtgcctgccaagcgtcgcgagggcaatggacacagtctgtggctgcgtggcgccaagggtaataatctgaaggatgtggatgtggagttcccgctgggcaagctgatttgcgttaccggtgtttccggcagtggcaagtccacgcttatcaacgagacgttgcagcctattctttcgcagaagttctatcgttcactgcaggatcctttggactatgatagtattgaagggctggaatatatagacaaggtggtgaatgtggaccagtctcctttgggacgaacgccgcgttccaatcctgccacttataccggtgtgttttccgatatccgcaatctgtttgtcggcttgcccgaagcgaagatacgtggatataaggcgggacgcttctccttcaacgtcagtggcggacgctgcgaagcttgccaaggcaatgggtacaagtgcattgagatgaatttcctgccggatgtgtatgtgccttgcgaggtatgtcacggcaagcgttacaaccgagagacgctggaagtgcgttttaagggaaaatccattgccgatgtgctggatatgaccatcaaccgtgcggtggagtttttcgagaatgtgcctcagatattgaacaaaattaaggttatccaggaagtgggattgggttatatcaagttgggccagtcttccaccacgctctccggaggtgagagccagcgcgtgaagttggctacggaactttccaaacgtgatacgggcaagactctgtatatccttgacgaacctactaccggacttcatatcgaagatatccgcgttttgatgaacgtgttgaacaaacttgtagacaaagggaataccgtcatcgtcatagagcataatctcgatgtcatcaagatggcggactatatcatcgatatggggccagaaggcggtaagggagggggagaactcctttcctgcggaaccccggaagaggttgctaaaagcaagaaaggctatacgcctaagttcctgcgtgaagaattgaatatcaagtgataattatctcatcatagagaatattatgaaaatcaataagacgaatgcagcaaggcttctcgacaaggccaagattgcgtatgagctcattccctacgaggtggatgagaacgacttaagtgcagtgcatgtagctgccagtttgggtgaggacatcaattgcgtgttcaagacgctgattcttcacggtgataaatccggttattttgtctgtgtcatcccgggtgagcacgaagtggatttgaagctggcggcaaaagcgtcaggaaacaaaaaatgtgaccttatcccggttaaggaacttttacctctgactggctatatccggggtgggtgttcacccatcggcatgaagaaacctttccctacctatatccatgaaacgtgcctgcggtttccgtatatctatatcagtgccggacaacgcggtttgcagcttaagttggatccgaaggatttggtaagggaagtgcatgcagaggtttgtattctttttaatgaataaatcttctatttctgccgagatattttaattttataaggaaatcttcaatagaatttatatatttgcaggaattattcaagaaatcaatccaattactaattctaaaaactaatttttatgttcaacaaacaccctaaaggtctgattgccgcatcttttgctaatttgggcgagcgtttcggcttttataccatgatggccattcttgtactttttctgcaagccaagttcggactggatggaaaagaggcaggtttgatctactcaacattttatttttctatttacattctagcattgataggtggtattattgccgacagaacccgtaattacaaaggtaccatctttgccggtattgttttgatggcggtaggttacttgatgctggccatcccgtctcctacaccggttgccaataagaccttgtttctggtgattacttgtgcagccttgtttgtcattgctttcggaaatggtcttttcaagggaaatcttcaagcgctcgtagggcagatgtacgacaatcctcagtactccagcatgcgcgattccggtttctccttattctatatgttcatcaatgtaggtgccatctttgccccgtttgccgcagtaggcgtgcgtaactggtggttgtccacattcggctacaattatgatgccgacctgcctgccctttgccacggacatctggcaggaacgctgactcccgaggctgtggacacttatagcgcattggcagccaaagccactatttccggaacacccgtaacggatatgacggtatttgccaatgaatatctgaacgtgttcaccactggtttccattatgcattcggtgtagctatcctggctatggttctctctttggtaattttcgtcatcaacagaaagaaattccccgatcccagcaagaaggttgctgcaaaagcgggcgatgccactgcagtggagatgaatgcacaagaggtaagacagcgcatgtatgcattgtttgccgtattcggtgtggtaattttcttctggttctcgttccatcagaatgggttgacactgacgtattttgccaaggaatatacagatttgaatttattcggcatggctatttcagctgagctgttccagtctttgaacccgattttcgttgtatctctgacaccggtcatcatggctgtctttgcagcacagcgtgccaagggtaaagagccttccactccgcggaagattgccatcggtatgggtattgctgccaccggcttccttataatggctatcggttcttatgtaagcaacttgccgatgcacaaggatataatcgctttgggtacctctccggtgaaggtgactccgctgttgctgatggttacctatctgatattgactgttgccgaattgtacatttctccgttgggcatttcattcgtgtccaaggtggctcctcccaaatatcagggtatcatgcagggcggttggctcggcgctactgccattggtaatcagttgctcgttatcggtgctatcctttacgaaagtattcctatctggatgacgtggacggtatttgtagtagcgtgctgcatttcgatgttcaccatgctgttcatgctgaaatggcttgaaaaggtggcgaagtaatcggaaacgaaagataaaactaaaggctgcgcaatgttcgtaatgaactgcgcagcctttagtttttggagggcttttaatgccggggctcagatttccagtcccatgatgtagtcattcatgtaatatccgtttcctatcgggaaatccccttcacggagtttccgcattcccatatgttcgtaaaactgcagtgccttgttgttacggttcacattcaattccatcagacaagggccgggatgcacttccttgatgtacttgatggcttcgcgaaagaggaaactgccgcaatgtgcaccctggtaataggggagcacataaatcttttgcaggtggaataaattttctccttgctgctgtacggacacatagcccgccgcttcacattcttcgtaggccaggaagtagacgtgaccttcctcttccatttgcttgcggatattgtccaatgaatacatccattccatcatgtagtcggtctgttcgggagtaaggatatccttatacgtgacagggaatatctgctgcgcaagtttctgaatcagtgcgcagtctgctgtcgttgcttttcttatggtaaacatatcggttgtatttatactgtttggggtgtaaagttaagccttttttgtgaaacaatcgttatctttgcagaccgttaccgaactaactaattttgattttaaaaattatggcatttacgagcaacattatgattgtccgccacagattactgaaggaactggtaaagctgtggaataacaacgaacttgtggataaaatagaccggctgcccatcgagctgagtccgaagaggtccaagcacgcgggacgctgctgtgtgcacaaagagcgcgcggtgtggaagtacaagtcattgccgcttctgggactcgatatggaggacgagacggatgagctgacccccttgtcggagtacgctgcccgtgcactggacagagcggaaaatggcaggccgaaagacaatatcatgtgtgtgattgacgaagcttgttcggcatgtgtgcagattaactacgagattacgaacctctgccgcggatgtacggcacgcagttgccaggtaaattgtcccaagaaggcagtgcacgtcaaggagagcgggcaggcatggattgaccatgatgcgtgtatcagttgcggcatctgccataagagttgtccctaccatgccattgtttatattcccgtaccttgtgaggaagcttgtcccgtgaaagccatcagtaaggatgagaaggggatagagcatattgacgaaagcaaatgtatctattgcggaaagtgtctcaatgcatgtccattcggagcaattttcgaaatatcgcaggtgttcgacgtgttgcacagaatccgcaagggtgagcaggtggtggctatcgtggctccgtccatcctggggcagttcaagacgactattgaacaagtatatggcgcattgaaacaggtcggttttacggatgtcatcgaggtggctcagggagcgatggataccgtcagcaacgaggcgcacgagctgattgagaagctggaggagggtcagaagtttatgacgacttcctgctgtccgtcttatatagagttggtgaacaagcatattcctgccatgaagccttacgtgtcgggcaccggttcgccgatgtattatgctgcccgcattgctaaagagaagtatccggatgcgaaggtggtcttcataggtccttgcgttgccaagcgcaaagaggcgcagcgcgacgaggcggtggactttatcatgactttcgaggaggtggcttccgtgcttgccgggctggatattcagatggagcaggcaaagccctattccatgagtttcacttccgtgcgcgaggcgcatggttttgcgcaggcaggaggcgtgatgggtgccgtgaaagcctatctgaaggaagaggcagataaaatcaatgccgtacaagtggctaatctggataagaaggctatcggtgcgttgcgtgcttacgccaagtcgggcaaggctccggggcaatttattgaagtgatggcttgcgagggtggttgtattaccgggccatgttcgcataatgaaataactgccggaaagcgccagctgacgcaggagttggcaaagagaaaagagacgtattagccctttgtccgtttatatgaagcatttgattgacaaattgcggagcaatcgcaggctggatgccgaagagtataaagccttgcttctttgtcgggacacagaacttgcagcctacctgcaggagcttgcccgggaagaagcgcttgcctgctttggcaataaaatcttcattcgcggactgattgagataaccaaccgttgccgcaataactgctactattgcggcatacggaaggagaaccggaacatagtccgttatgagctggcgcaggaggagattctttcgtgttgccatgaaggctatcggttgggtttccgtacctttgtgctgcaagggggcgaagcgccggcggtgaaggatgaggggatggtggagacagttgccgccatccggcaatccttcccggattgtgccattaccttatccttgggcgagaaatcgcgggaagcctacgaacgtttcttcctggcaggtgccaaccgctatctgttgcggcacgaaacctgcaacgaagggcattatcaccggcttcatcctgcggagatgtccctttcccatcggttgcaatgcttggactggctgaaagagataggctatcaagtgggaaccggaatcatggtgggcagtccttaccagacggtggaccatttggtagaagacattctcttcatcgaacggtttcagccggagatgataggcatgggaccttttcttccgcatcacgatactccgttttcctcttttccgccgggagatatggagttgacgttgaagttgctttctatcttccggttgatgcatcccgcggcactgatacctgctaccactgccctggccacacttgctccggacggacgggaacggggaatattggctggcgccaatgtcgtgatgcctaatctttcgccttctcatcagcgggcgaagtactccctctatgataacaaagcttctgcgggtgccgaagcggcagaaggtttgctaaaattggaggaacaactgaaagggataggctacgaggtatcaaaagagagaggagattatgagaatggagaattgaccgttgataattgataattttcaaatcttcattctttattttaattaccaattatcaatttacgaagtgtataacataaagtcaagacaagcggaagaattcatcaatcaccaggagatattggatacattggagtatgcgcaggcaaaccgcaacaaccgtccgctcatcgaaagtttgattgacaaggctgctttgtgccaggggctttcccatcgggaggcggccctgctgctggaatgtgacgagccggaactggtgcagcgcatctatcatctggcacgtgaaatcaaacggaaattctatggcaaccgcattgtgatgtttgccccgctttacctttccaactattgcgtgaacggttgcgtctattgcccgtatcatgccaagaaccgtaccatcccccgcaagaaactctcgcaagaggagatacgccgcgaggttatcgccttgcaggacatggggcataaacgcctggcgctggaagccggagaagaccctcgaaacaaccctatcgactatatcttagagtctatccgcaccatctacagcattcatcacaagaatggggccatccgccgggtgaatgtcaacatagccgccactacagtggagaactaccggctgctgaaggaggctggcatcggcacttatatcctttttcaggagacttacagcaaagagcattacgaagccttgcatcccacgggaccgaaaagtaattatgcctaccacaccgaagcgatggaccgtgctatggagggtggcatcgacgacgtaggtatcggcgtattgttcggtctgaacacctatcgttatgacttcgtaggactgctgatgcatgccgaacatctggaagctacctttggcgtgggtccgcataccatcagcgtgccgcgtatctgtccggcagatgatatttcgaccgaggattttcccgatgccatctcggatgagatgttctgccgtattgtggcggttacccgcattgcggtgccttatacgggaatgattatttccacccgtgagtcggaagccgtacgccgtcgggtgctcgaactgggcgtttcgcagataagcggcggttcgcgcaccagcgtgggaggctatgccgtgccggaagccaaagaggaagattcctcccaattcgatgtgagcgaccggcgcacgctggatgaagtggtgagttggctgctcgacctggggcatatccccagcttctgcaccgcctgctatcgcgagggacgtaccggagaccgcttcatgtcgctcgtcaagcgcggacagatagcaaactgctgccagcccaatgcactgatgacattaaaagaatatctggaggactatgcctcctccgaaaccaaggagaagggcatacagctgattcgtgaggagatggagcatatcccgaaccccaagatacgggcgatagccgaacgtaatcttcaggagataggggaggggaaaagagactttagattttagatttcggatttatgaataatacacctcgttccaaccgcctgcacattgccgtctttggacgacggaacagcggaaagtccagccttgtcaatgccttgaccgggcaagacacggcattggtatccgcaacgcccggcactactaccgatcccgtaaccaaagccatggaagtatatcctttgggcccgtgcctctttatcgatacccccggttttgatgacgacgaaggcgaactgggcggtatgcgcgtggagcgtaccttaaagacggtggagaaagcggacatcgccctcttgctttatgaagctgacggaacgctggaacagcaatggctaaagctactggctgcgcgcgaaatccccgtgatactgatactgaataaagccgattcccgtcaagacaccgcttccgtggtgcttcggattgaaaaggaatgcgggcaggctcccgttgtggtcagtgccaaagagggtaccggcattcaaggcattttcgatgctattctcgaaaagcttcccgagaattttggtgagcagactatcacgggcaattgggtaagtgaaggagatgtcgtcctgctggtgatgccccaggatatacaagcccccaaaggtcgtctcattcttccgcaagtgcagaccatccgcgaactgttggataaaaagtgcttagtgatgagctgcaccaccgacaagctgcaagcctccctgcaagcccttgcccgtccgcctaagctgataatcaccgattcacaagtattccccatcgtctatcaacaaaagcctgccgaaagtagtcttacttccttctcggttctttttgccggctacaaaggagatatcaatgccttcgtggagggagctgccgctatccatagcctgaccccccaatcgcgtgtactgatagccgaagcttgcacccacgccccgctgaccgaggacatcggtaccgtcaaaattccccgcctgctacgaaagcgcatcggcgaggaattgcagatagactttgtatctggaaatgactttcccaaagacttgtcccgatatgatttaattatccattgcggcgcttgcatgttcaaccggaagtacgttctcaatcgtatagcccatgcccgcgcacagcacatccccataaccaactacggagtagcaattgcgagtctgaccggtatattggataaaattgttatctatcggtaaatatccctttccctctctgttcacgttactgatgttatagagtagcgtgaactacttttcttgttaataatgtttaatatatggtactttgtaatgcaaggtactgatataatacatatatttgtgccatacaaggaacaacaatagaatgaataaggacactcattactctattgcgcagcaaaatagtaaatcgtaaattgtcaaatagtaaataccattatggatgtaaacaatgtaaagtcgcaaatgcgcaagggcatgcttgaatattgcatcatgctgctgcttcacaaagagccggcttatgcttcggatatcattcagaagttgaaagaagccagactgattgtggtggaaggtacactttatccgttgctcacccgtttgaagaacgacgaccttttggggtatgaatggattgagtctacacaaggtcctccccgtaaatattaccggttgacggaaaaaggagaagtctttctcggtgaactggaaacatcctggaaagagttgaacgatacggtgaatcacatcagcaattcttgaaatgcccacagagaatatgctgcattcgccgaatggtaaatagtaaatcgtaaatagtcaaattgtaaataaatagtgtgttatgaaaaagacattaactgtaaatttaggtggaaccgttttcaatattgatgatgacgcataccgtcttttggataattatctgagtaatctcaagatgcacttccgcaaggaagtcggtgccgacgagattgtagatgatattgaacgccgtatttccgaactctttgccgagaaattgtcggccggttcgcaagtaatcacgatagccgatgtggaagaggtgattgcccgcatgggaaagccggaagatatggaggcggaaggagagagtgctagtgccgattccggcagcacgagtgccgggggcggctatggtgccggtgcttggaacagcaataccgcttatggcactacacgccgtcgtctataccgcaatccggatgacaaaatgctgggtggtgtcatcagtggaatggctgcctacctgggatgggatgtaactttacttcgactgttactgcttgtcatcttgatttgtggggtagggacattgataccggtctatatcgtgtgttggctggttataccggaagcccgcacagcggccgagaagttgagtatgcgtggcgaggccgttacggtggagaatatcggaaagacggtgacggacggttttgagaaggttgccaatggggtgaatgattatatgaggtcggacaaaccccgtactttcttgcagaagttgggagatgcattggtgatgattgtcggctggttcttgaaaatctgtctggtgatatttgccattatctgcagtccggtattgtttgtatttggagtggtatttgtggcgttgttgtttgctgcgatagcggtggctgttggtggcggtgcggctctcatttcctttttcccgatggctgatgtggtactgcctacttctccgttgtctgccattgtgatgtacattgcaggaatcttgctggtaggaattcctttggtcagtcttgtatgggccatcttcagtcagatattcaaatggcagccgatgaattccggtttgaagtggacgctggttattctttggattgtaagtgcggcttgcttcggaatctgttttgcagtgcaaggggctactttcccggaattgggtatctttaacttctgagaatagtaatttcttttttaattgatatcgtgtttgtaggaatctgatttctataaacacgatattttttatttcaatgtaattatttgttatacagtggaatatttcgtttggaaaaggtgttttttaaacgttcgtttaatgaacgcaaagataacgtgtatttttgaatctcgcaaaatgtttaataaaaatattctataaatttctttttagtgagtataatactttgtcagtaagcctattgcattgtatttctctaacttcttccttttactaatttttaagtaatcttccctctttagttttcttaaatattgacgttcaaaaaacgaacgtctattgaacgctttttgcttgcaatagattcgtttacagcattttacctgacaggtaatgaatgactgcaaaaaatctgttgacaagaagggcataaagcttgtcgtattctacataaagtgtccgcaagtaattgaatttcaagtgtatgcaagaggttcaaagccccaggagaacacccttgtctgaacaaaagcataaaaatgggaatagagaaagaggtcgaaatctggtatgctatgcgtgccacctaccgcagagaaccagatgccatgcatctgctcaagaaagaaaatttgggctgtttcattcctatgcaatacaagatatgtataaaaaaagggaaaaaagtccgtgctctggttccggtcgttcataatctgctttttgtccatgcccgtccttccgatgtgcagcgtgtaaaatctcaagtcacttatctgcaatatatcaccgatacccgcagtgggcagaagattattgtcccagacggtcagatgcagcgtttcattgccgtatccggcacttacgatgatcatcttctttattttcaaccggatgaattgaacttgtccaaaggcaccaaagtccggattaccggcggtgaatttgaggggcaagagggtgtgtttctgaaggtgaaaggcgcacgtgaccgtcgcgtggttatcgaaatacaaggtgtcatagctgttgccatggccactatccatcccgatcttatagaagtaatcggctgaactttaatttttaattcttaattctataattgcttatgtctctttccgaagaagcaatcactcttcagcgtgctgcgcacgaactgatgtatttgggtatggacggcagtcccgtctatagcgatgacttgtcacggcggaacggtgaggtctaccgtcttaccatggctttataccggtcgggtgtaaaaggcactaccatcgaagagcaggcaaatgtctgtcttgcccttcttatgggttacagcgcctcttttgtggaccatggcgaaaagcagcagcatgtccaggaagtgctggactgttgttgggatgtgctcgacgcccttcccgcttccttactgaagctccgtctgcttaccgcctgctacggtgaagtgttcgacgagtctttggccgacgaaggccgttccatcatcgcctcctgggattccttatcacttactcccgaacagcaggaagcggttgatgaatttcagaatgtgacagacaatccctatccatgggaatatatcgatgaataaaacttttcatataatgcttaacaataaatccgtattgattaccggaggaacgggttccttcggaaagaagtttgtggaaaccattctccgtgattatccgcaagtaaagaaaattattatttactcccgcgatgagctgaagcaatttgagctgaaacagaaatatcccggtcataagtatccgcaactgcgtttctttatcggtgatgtccgtgacctcgaacgcctgacgcgggcttgcgaaggagtggacgtgattatccatgcagccgccatcaagcaggtggataccgctgaatacaatcccgaagagtgcatcaaaaccaatgtacacggtgcgcagaatgtgataaaggctgctcttgccaccggtgtacagcatgtggtggccctttctactgacaaggcttgtgcccccattaatctttatggcgccaccaagctcacttccgacaagctgtttactgccgccaacaatatcagcggttccaaggacatcaggttctccgtagtccgttatggcaatgtgatgggttcccgcggttccgtaatccctttctttatcaacaagcgtgacaacggggcgaaggaacttcccataaccgatatgcgcatgacccgtttcaacatttcactggaagccggtgtcgctttggtcatgtatgccatcggacatcacctgggtggtgaaatctttattcctaagattccttcctatcatatccaggacgtggctaccgccattgcacccaatctgccgcaggtggaagtgggcatccgtccgggagagaaactgcacgaggagatgattactgtaaccgatgctcttgatacaatcgatttgggcagatattatgtcattcttccttccgtatctttcaagcacagtcgcgaagagttcatcagacatcacaatgcagtacccgttcccgacggtttccactacagcagtgacaacaatacggagtgggagacagtagagactatgcgcgagaatataaagaaatacgttgaccctaatttcgaggtgaaatgataagcaagcctattccatacggtcgtcagcatatcacagatgaggacatccgggcagtcatcgataccctgaaaagcgattacctgacacaaggtcccaaaatcagggaatttgaaacgaaatttgccgaatatgtaggtgcacaatatgccgtagcggtgaacaatgctacttcggggcttcatcttgcagctaccgcactgaatgtaaagccgggtgacaaggtgattgtcactcccatgacctttgctgccagtgccaactgcattcgctattgtggcggcgaggtggtattctgtgatattgacaaggatacttacctcatggatatccgtaaactcgaagccatgcttaaagcttctcctcgcggtacttacaaaggtattgttccggttgattttgcaggctatcctttggatctggaagagttcagaaagcttgccgacgagtacggcttgtggattatcgaggatgcctgtcatgctcccggtggctatttcatgaacagtaaaggcaagaaacaacattgtggcaacggttgttttgccgactgtgccgtattctctttccatcccgtgaaacatatcgctacgggtgagggaggcatggtgaccaccaacagcaaggagctctatgacaagctttgtctttaccgtacgcatggcattacgaaagaccctgctttattgcacgagcatcatggtggctggtattacgagatgcaggagttaggctacaattaccgtctgactgattttcaggctgccttgggtatttctcagctggagcgtgcgaaagcaggtcttgaccgccgccatgaaatcgtgagacgctataatgaagcgttttccggaatagatggtatcaagactccgttcaatgctgccgatgtctatcatgcttatcacctttatatcattcaagtagctgaccgcttgggcctttataattatctgcacgagaacaatgtctatgcgcaggttcattatgctccgcttcatctgatgccttactatcagcagtggggaaataggaaaggcgatttacctatagtagaagagtattacgaacattgtctgagtcttccgatgtatcccacgctgacggacgaggaacaggagtatgtgattaaaaaggttatagaatttgtagcgaaatgaattgcgtaaacaagcttgttctcggtaccgtacagttcggacttgactatggaataaataatcagtttgggcaggtacaccaagatgaggtcgggcagatattgaggtgggcaaagaaaagcggaattaatacgtttgatacctcctctgcctatggaagtagtgagagcgttttaggaaggtctctttctgaaaataatcttcagtttcagattatttccaaatatccccagtctaaagaaaatgttgctaccgtattcgcttcttctatagagaagctccatcaacagaagttatatggttatcttgttcatcattttgagttctatcaatcccatcctcaattatgggaagagatgaagcaactcaaagcagagggaaaagtagaaaaaattggtttttcgctttatgatatcaatcaactgcaatatttgttagataatagagtagagtttgatattttacaatttccttataatctcttcgatcggcagttcgatgtttatctttctcaacttaagcagtctggggtagagatacatactcgttctgtatttttgcagggacttttttttaaggatctgggtagccttagtgggcagatggaaccattgaaaccttatttattgcagattagattctattgtgcagtgcattctatcaccattgaacaatgtgcattaagttttgtgcttcgaaacccctttattgatggtgtattgataggggttgataatataagtcagttgcagaacaatatcaatgtggccatctgtacgaaagaggttgaggagttggctaaacagataactgtgaaagaaacttatttgttgaatccttctaattggttataatatgaatgttttagactttttctctttggagaataaagtagccattgtcactggcggctacggttatttgggaaaagcttttgtacagtctcttaatgaagcaggggcaaaagttgttgtggccggtagagatgaacaaaagtttaaattggcttttcccattgtttccaatatctatttctgccctttggatatttcgaacacagagagcatcaaaaaatgctttgctgatgtgaataaaacatatggtagtattgatattttggtgaataatgcagtatatctgtccggtcaatatcctgaagaagttagtgacaaggatttggcttattcatttgatggtattataggtagtgtttacaagtgtatacgcgaagtaattccttatatgagagaacaaaagtctggaaatattgtgaacatcgcttctatgtacggtgtggtggttcctgactttaaggtttacgacggtgattgcaacccaaattttaatcctcctcaatacggagcctccaaagccggagtcattcaactgaccaaattctttggtgaatatctaataggtgataatattcgtgtaaatgccatttctccaggaccttttccttcgccttctgtacaaaagaatgaagagtttgtaagtcgtttggcaggtaaaaatccttcccggcgcattggcaatcctgaggatttaaaaggtgcattgctttttttggcatcagatgcatccaaatatgtagtgggacagaatattcaagtagatggagggtggacaatatggtgaatacactttgtattgtgcaagcgcgtttgacttcatcaagactgccagagaaggtattgatggagttgggaaacagtgggctttcaattctcgaacatgttaatatgcgtctcaataagtccttgaaaatagataaggttgtatttgctataccagacacacctttgaatgataaactggccgattttttggaaaataagaagatagaatattgtcgaggtagtgaaaatgatgttttagggcgcttctatcattgtgcagagaaatataaccctgaattgattgtcagggccacttgcgataatccgtgtgttgattggcatttggctgatgaaatgatagaaaactggggtgatgcggattatatgtattgtaaagaaactccattgggtacttctgtagaggtatttacaaagcatgctttaaatgaagcttatcaccatgctaaaacccctgaagaaagagagcatgtttgcccttacatagctcgtaatgaaaaaaatatttgcaaacaatatccttataataagcttagttatcgtttgactgttgatgaggaagccgattttttgctgatgaatgaaatctataagcagctttacaagaatgctcctattgagaataagatgatttatgaatacttggagaaacatcaagaactattggggattaatagtaaggtaaaacaaaagtttctctgattaggagccgatttttcatgattccggccagtttttattttagtttcgatatttatctttgtgtgtagtaaaaacaaagagacatgaaggcaacatctgaatacatcactcttttacgtaagtacatggccgaaaatgcttctaaatatggcattatgcgtatgggaatattcggttctgtagcgcgtgatgaacaaactgttgagagtgatgtggatgtttatgttgaattgcaaacgcccagcatgtttagtttagttcacatcaaagaagagcttcaatacttgtttggctgcgcggtggatatcgtaagattgcgtgaagatatggacggaatattgagactgaacattatggaggaaggtatttatgcataaagaagaagcacttttcttttgatgttttcttcatttgtttttttgtagcaaaagaaactgtatatggacgaaaaagaatgcttgagtaggttgtcaccctttttgttttgggacattgatatgtctcaagcttctatggatgcctgcccctcaacaagtggttcagcgagtacttgagtatggcaatcttgatgattggcgtttgatacgtgcgtattatggtttgcatcgcattgtagagttatgtaagcagatgcggacacttgatccggtttgtctttcttatatttgcctcttgtccggcacgtcaaaagaagaatatagatgttatcatacggtacagtcgaggcccacactctggaactcttgtgcttgatgtggtgaagaatttccaataatttcaatttaattcatttcattttcttgaaaaaaatctatttccgtgccgatgcaagtgctaccatcggctacggtcactttattcgtactctggctttggccgatatgctgaaggacgattttgattgtaccttctttacttgtcatcctacctcatatcaggtaagtgagatggagaaagtatgtcctttcatccccttacaggaagaatcacattatgatgagttcctttcccttttgcaaggtgacgaaattgtggtacttgacaactatttctttactactgattaccagcgtgccattaaagaaaagggatgctgtctggtgtgtgtggatgatatgcacgacaagcattatgtggctgatgttgtgataaaccatgggttaacggatgaatccttgtttgatgtagagccctataccaaactctgtttggggtttgattgggcgttgctccgtcatccgtttatcgaagctgtaaaaaaacagcgttgtcatactatagggggtatagaaaaagttactattacatttggcggttgtgatgattttgatgcaaccggttactatgcaagtaatcttcttgagagcaaaaatattaaatcaataaccgcagttgtaggtgatgcctataaaccaatccaccctatatcacaagatagacgccttacatattgttcaggcctttcagctgaacaaatggctgatttgtttaggcagtcagatctcgttatttgttcagcaagtacagtgtgcattgaggctttgttttgtaatacaaaagttgcggcagggtggtttgtagataatcagatggatttctataatcttgtcactgctaaaggatgggtaatcggtttgggcaatgtggagcacccctatatagatatggatgctcttaatgcatcaacggttccttgcgcatctatagggaaagacattcgtcaaaactattgccagctatttcataacttacaagatggttattaccttaggaatgtacgttttcaagatttagatttgttgtttcattgggccaatgattctactgttcgtaacaatgcgtttaatacagatcctattgaatatggtggtcattgtcaatggtttgccaattgtatgcaaagagatgatgttcaaatctttattctagttaagaatagcgctcttgttggtcaagtccgattcaatattgaagagggtaaagctgagattgattattctatatcatcagaaagtcgtggaaaaggtttgggtaatgttattattcgattgggcatagaagaggcaaatcggatgggtattaaagaattaatagcaaaagttaaagacaagaatataccgtcgcaaagagtgtttttgaataatggctttatgtgtaatgaagatatattgacatttgagggagtaaagagctataactatttgatgcgggaaccgtattgaaattttaaactgtttttatgaataaatatctgttagattttccgttttataccaaggatcccgatacgaaaagtgcattggatagtgaaatcctaagattagtccatgattatggaaccccattctatttgtttcatgaaaaagatttttgtgaaaacttccaatcattatgtgactctttccgtgctgtttacgataactatattccttcttactcttataagaccaactataccccctacatatgtaatttagttaaacagatggggggatatgccgaggttgtgtccgatatggaatatactttagcaaaaagattgggctatccggacagtcagattatttataacggaccttgtaaaggccgttgtatggaggagcatattcttaatgggggcatatctaatatagacagtgaggatgaagctttacgtgtcgttgaaatatcccgcattcattcaaacaagattataagggtcggtatccgtgttaacatggatattggtgctggatacatttcacgttttggtctggaaaaagacagtgaatctttccgacgtacgattgattgtctaaaggcatgcggcaatgtcgttttgagcggtgtacactgccatataagtcgtgcacggggattagaggcttggcaaaatagaattgacggtttattggatgtcatctctaactattttgacggagccgtagactacgttgacgttggaagtggtatgttcggacaaatggatccttctctcgctattcagtttggggatcatgttccgacttatgatgattacgcccgcgtagtggctggaactatggcgcagttcttttctggttcagaaaagaaacctattctgttttcagaaccgggtactaccctcatatcaaagtttatatcactggcaacccgtgtggataatatcaagtctattagaggtaaacaatttgtaaccgtggacagttgctattacaatgccggtgaaatttgcaagttcaaggaagtgccttatcgagtggtccattctgcaggttctgtcaatgcgaattatagttcgggaatcacagatattatgggatacacttgtttggaacaagattgtttatatcatgactttaaggaacctgtttctgtaagtgacattttgctctttggtaatgtggggggctattcaatcgtatcaaaaccaccgtttatccaaccggattgccaaatgttgtgttattcgcaagatggcacgattaaggtaatcaaacgggcagaaacttttgatgatgtgttcaacacttttataacagagaagcaatgaaagacctcacagtattaatttccgccagtggctcaccatctattcccggcatcatagcttgcttcaaaaataatggagaacgtaaaattagggtagtaggtgtggatatgtctgatgaaccttctgccaggtatatggttgacgctttttatcaagtacctgcagctactcatcctgattattgtaacatattgctcgatatttgcaagaaagaacatgtagatatctatttcccgggagtttcggcggaagtgagtgcattggtgaaacgatgggacgatttcaagcggataggggtcactttgtcggtttccaacagcaattctgtagatgtggcaaataacaagcttaagacataccaaatgcttgcagaggcagggataccggtgcctgaatattatccagtccatacagtcaatgactttgttgaagggtgtaagtatatgggttatccccaaaaacctgtatgcctaaaaatagtcaatggtagtggaagccgtggtgtaagaattattgatgcgaacaagtcccgttatcagctattcgcccatgagaagcccaacagtttctatacttcttacgatgatatgctgagcattttgaaagaagtggatgtgctggatgagcttatgttggtggagttcatgccaggtaatgaatacacagttgaccttttggctcataagggtactgtaatctatcaggtaggccgtgaaaatgtcgttagccttatgagtattgcacaggaaagcgtattggcttatgacaggcaagcttataaaatatgtagcgatgtggtgcgcttaatgcacatggatggtaatgtgggttttgactttatgcgcagtgcagatggaacggcagttttaatggatattaatcctcgtttgacggctacggtatctgtaattgcagcaggtggagtaaatttgccttatctccgcattaaacaattgttaggcgaaccattgccccatgtctcgcctcagtttggcacccgtatgaaacgtagatacttggagtattttactaactctgaaggagaactcatcaaattctaaatatagtatatttgcatagatatagatatggtagaaatcaattttgataaactggacagaacgctggttttggcagaactgtcttgtaatcatttgcagagctttgatattgctgtccgtaccatcgaggcaatgaaaaaggcaggtgccgatgttgtaaaagtacagaatgacaatccagacggaggtattaccattgattgtgataatgaatattttcaaattggtggaggcactttgtgggacgggaagacattgaacaaactctataaggaaacatacacgccttgggagtggttgcccaaattgcagaaagttgcccatgatttggatatggagttcttttcagcaccatcagatttggaaggagttgattttctggaaaagatgaacgttcctgcttataaagttgcaagtttcgagattacagatacagctcttgttcgcagaatggcctcaaaaggcaggcctattcttatttctacaggaattgccgagatgactgacatacaagaagccattgatatttgccgtagcgagggtaataatcagattgctcttctgaagtgtacatcttcttatcccactcctttagaagaagctaatgttttgacaattcccgatatgaccaagcgctttaaagttgtggcgggcctttcagaccactctatgggacactctgttgctgttgccgctgtggcattaggagcaaagattgtggaaaagcacttcattttaagtagggcaatgggaggccctgatgctgctttctcaatggagccggatgagttcaagacgatggtagatgaaatccgtaatacagaaaaggctttaggcactgtacaatatgaactaaacgaacatgcacggttcaatagaggtttcgctcgttctttgtttattgttgaggatgtgaaagccggcgaaacgcttacggctaataacttacgctctattcggccagggcaaggattgcatccgcgatatttggatgaacttctaggtagaactgtcaatcgtgatgtcaaacgtggtactccaatgaaaatggagtacgttcagtaatatatttatgtctctatttacaaataaacgtatcatggttgttgccgcccatcccgatgatgaactgctgggcctaggcgctaccatgcacaaactagtcaagacacaaggagtacagacccgggtcatcattttgggagaggggattacttcacgctcagatacccgtgacacggaacagtggaaggaagtcttggaaaggcatcatcagaatgtggagacggcgcggcagttgataggctatcacagcgtgcaggcatataatttttccgacaatcgttttgacagccatgcactgcttgatatcgtaaaggtagtggagcatgagaaggaacagtttcgtccggactttatctttacccaccatggtggcgaccttaatattgaccatcagatgacttttcaagcagtgatgactgccacacgccctatggaggacgaaccggtgaaggctatttttacattcgagaccccatcagccagtgagtggcaggctacttgcgacccacgccatttcactgccaatttctatatggagatttcggaggatgatttgaaagcaaaatgtgctgccatggcagcctatgagtttgagagccgtgcttttccgcatccgcgctcttcggaggcattgaaagcccttgcccggtttcgcggctataccgtaggcaaacacttggccgaggcatttcagatagtgcggatgatagaatgaagaagggagccttttagagccccctatactccctttccgcatcgaagcacggacaagctttcgctggattcaaatcatggtgccccacaatcagcgcccgtggaaagatacgcttcaactcacgtagtagtgccagtaacgaagccttctgttccaatgtacgggtatcggcaggaaaacttgcagcatccagtcctccttcataacagatgccgatagaatggcggttgtgattgagggaatgcgcacctattttttccaacgggcggccgcggtgtatttcgccgttgcgggtcagatagaaatgatagccgatgtcacggaagccgcggtggtggatgtggtcgcggcggcaatcctcaaagcccagggccacgccttgaggcgtggctgagcaatgaacaatgagctgggtaatcgtacgcatggctatttgcaagcgcccagacctaaagctcccgctatggcggtagctacggtgatgattactttgaggacaatgccccatacggattttgactttttgtcttcactcatgatgattggtaattgataattagtaatttgtaattattctcatcctaacggattctcgccctgattgccgtcacttcctccggaaccgccgtcggaaccactgccatcgggagcttttccacctacggtgtacagggaagattctttcagctgtccatccaggttgatttgggcattactcagttcgccggtggcacgggcgcggagcttcagccccttcacgttgttggccagcgagaagtcggcagcggattgcgcccctttcttgctgacgattcctacggagaagatggcaaggtcatccagtttcacgttcttgccgtccagaatcaattctttggtgcaggaaaccatgtctgccagtacccccttgatgacaccactcgaatagggggtgttgtgattggacatgtgcttggccaatttttcgatgtcgaaggtttcttcgattacggggcgtgcataccagaggcctttcagcgggctgtcttcgcccgtcacttgatactttttgtaacgaatcatacaattaaaatttagaagttaaaggataaaaacatttgctgtgttgaactcaacgatgcaaagataaggctgtggatacgggcgtttgccggtttttgcaggttctcgtctgtttgggtctgttttagtcggttatttacgcttgtaagtttgataatgtcatgatttatagttacttttgatgaaatataaatcgtaactgtcaactatggattcttttgtcatacgtacatacgggcgtactgaattggcccaaatctattgtcccaatctttgtccggaggctgccttccgcaaactgaaacactggatagacctttgtcccgatttgcgtgacggactttccgccttgggtggttcttcccgttcccgctcttatacgcctgcccaggtgcggctgatagtggctgcactgggagagccttaaacctgaggttggatggcgtaaaggtcaggccgggaagcgtaaaggtgaggttggtacacttggtacagaggttcatccatcctttcgcctcacacacatacgcgtgcgtgaagcgaagtgaatgtcagacttttggtttccggtagtttcccttgccatctacattttccaccagcccgtgtttctgcatgcgtttgagccaggtggaggcggtttccgatttgatgcccatctctccggctttctgcaggaaagaggcccgtgtgaattcttcttccatgctgtctaccagagcatcccggtcggcattgccgcggcttgtcacttcggtgttgggcaggaaggagaggatatgggtggtatgccgataaaggctttcggccagtgagagtacggcatgaaagtcatcggaagcaatgaggagattccatcggctgacaatgtggtctttcagattgtctgtggctgtgtgagggtcgggcgacacgtaaggcgaggcggtgatttccccttgttccattgcgcggagcatggccaccacttccatgatgcggcagatgttgatggccagacgtgccacgctgcttgacatctcgtttccgttggctagtccggagcgtacgaaaagccgggagaagagccggttgaattcatctttctgtccgtccgtaaggtgaagggtgaatattccgttcatgacaatggttttcagtttgtccttccattccatgcccagagccttgaaggtatcttcaagatcgctgtcattgcggtcgaactggttttgccaatgatgtatggcaggcatgtagtagaatacctggcgagaaaagagcccgttctcagcagtgggaatcaggggtttcacttgtgagggggtgcctgacagaagtacggaaagataagttttctttacctctcggtattcgtggtcggtgcgccggttgtaggacagtcggtcgtggtcgaaggctttgcgcatggtgtcgctccagtgtccgtattccgaaccgatggcggtggagatggtgtcggcttcgctttcgcatatcagtccggtaccgtcggagtccatcaggttttgcaggatgccggttccggtgttgttgcccgagatgaggaacatcttgttgagaggcattacgggagtctccgtttttccacgttccttgcccagtgtgtcgtattttgctttttcgcggcggtaacatgccatgctttcgtctacctgcccacgtatttcatcgtgaatgggctcggcaagcaggcgtaccaaggagagcactcctttgccggatgcaggtagggctactacaaaggtttgcaggcagggggacatcatttttcctccgtaggaacatcggacgtgttttcccatactggcacccaatacggtgatggcacccagtagcagtacatcgtattgggcgagggaggttccgcagctcatgatgcgattcaggggataaggccagtggaggtgttcgtcgaaagtgggtaatggagacagtggttcaatgcccgatgcggactcttcctcgcgtgcgcgcgtgtgtgaggtagaagagaggggtgaactttgtgtaccaagtgtaccaatggcgggtgcggcttcatgctgaatcttcacgccgcaaagctcggccagatgaaaggcggttcctagatgcacgtcgttacggccggtcttcagggcattgctgaagagcttgtcggctgcccgttggtcgtacttggacgacaggctgcacagacttaaaaaatcatgccgtcctgcttctccgcagtcggtggcaatggcaaatgccagttgtatatattcttgataggttggagcaatgtctgctcctgcatttctgactgcttcggccagaaggtgcaatgaagatagtggttccatcggatttggtaatttataattagtaatttgtagtcggtgatttgcaatgactcatcattcgaaattcacaacttctctgagcagtgccttcgggtcatggcagaggaaacaggcacgtacgaggtctttccccgaagtgtccactccttttccgggttgtgtgttttcggcgtcatacatgcagtggacgtagttcatggcccagcgcaccgcctccgtgctgtcttttccgatagggcagggtacaaaagcctttacacctcgtccggtagggctgatgaacaccagtaccggtgcgaggtaagggtctttgaacagtagttgcttcaggcgtccggcttcgtcaggcgagtcgagatggtctacgtccaccaccaccagtccggagggtagctttaggcagtcgctccgtcgtcgggtgaatacgccgcagggggtgacgtagggtaaggtttgctgtttcagcatccggcagttgttatcatcgccttgtagggcagcttcgcggatggcttgtgttagggtgatcagccgtttgttggctgtgatgagttggtaaacttcgttcagttctaaagtacgcaggggggtaagcgtggcgcttttcacgattttcccggtcgctccgtccttcatcggtgagatgggtggcatgaaaagcgacattttaaaagattttggcatattacctaagttcaagcggataatgcaacaggagtgagaatgatgacaatgagaagatacgaaaagaataatttttcagaggaacagagaaagaagatttctttcccttttgttcccctgtggaaaagttgtttctttgcatcttccagttccccaacattcagttgcaatatgaaacagctaaccgaagaacaaaggtataacatttccgcttatctgcaaagcggaaagtcaagaaccgagattgccaatcttgtaggagttcatcgtagcactataagtcgtgaattacgtcgtaatagtgataaacgtaatggcatttacaaaccggatctcgctcaggctaagtatatgtccagaatgcgttcacgaaagcacttcgtgaagtttacggacgacttgaaaattcaagtagatatactcataaagaaagatttcagtccagaacaagtgactgggtttatgcgaacaaagggcttggaaacagtttctcatgagacaatctaccagtatatttgggaagataaaaagcatggagataagttgttatacaagcatttaagaagacggggaagaagtcataagaagagaggtgcattgactaatggacgtggttttatcaaaaaccgcgtggacatagacaagcgtcctacgatagtagacaagaaagtacgttttggtgatttggaaattgacacagtcattggaatgaatcacaaaggagcactattaactataaacgacagggtaactggactagtatggataagactacttagcgggaaagatgccagcccgctaactaaagctgccatcgatgccttggaaccttttagagaccaaatacatacaataacggcagataatggaaaagaatttagttttcacgaagaaattgcacgtaaactaaatatttttgtttactttgcaaaaccataccactcgtgggaaagaggagccaatgaaaacagcaatggtttgattaggcaatacttcccgaagggtacggactttagggacataaccaatgaacaggtaatgcgcgttcaaaacatcttaaactcaagaccgagaaaaagattgggttacatgaccccaaaggaaaaatataaattattaactaacaatgaattcgacactgttgcattgtctgtttgaattcaggttatacgtttaaatagttggctcaaaggtattcattctctttcgttgaatctttcccacatgtaagaaagattttaaaggaacaaagtaaataataacaatatataacataatattctatctaattacttaaaatttatctaaatgggcaaaaattttattcacccttcattgggcttttttatcgagcgaacgagaaaacagagtggagtcactattgaaactctttgcaaggatttgcatatttctccatccacgtacatagacttaaaaaaaagggtgcaacgcctcacttagtacatacgaaactcttctgcgatactatatcgatgaactggaggaactgggtgatgacgaaatcaggaaattggcgggggaatgggtggagaaatggctggagtctaggaaaacaaggtagctgttttattgtcccacttaaaacagaaggatatgatccttacattgattatctgaaaggcgttagcatattctttgtagtattggctcattgtttgttgatataaaattgcttgttgttctctctttggggagtacagtcagttcccttgtttctattgatacaaacttttcatgttcataagaagggggggatatggcggttaaactgccggatttcaaagaactgttactttatttttagtaccaaacagaggccgttcctcatagaatgtctcttcaggcattctgttcaaagaataacgtcccttacaacatttttcataaatggtataaggatacccacagaaaaatagtagaagttcaggtgaacggtgtccctcaggttcaataccggagtccgtgccgtcttctctttcagggggaaaaactgtaaagaaggcgagtccttattccctcttgttgggcacagacaccggaagccgtacaaagccccgagggtacttcctgtgcgtatatccgtggagctaactttgagtagtggcctacatatcctcccaaaggatttggattctctggacctataccgtccgaaccaaaaacaggaagacccgtgtcgagtatgacatttatatcgtcgttgaaagaccgtcgtatcgtttgcctgttcgcttatgataatcgttcctatagtcttttcgagaaaaagtttattgcgagctatcagtttgataatcaaagatgacggaggtaacgaggttgtctatcggatagactggaaggacgtggtctttcagttagataattctgtgattaaatcattaaaaataagatgattatgtcctatatttatatggttatatcaagttttttgtatatttatatcgcaaaaagcgggatatggatacggacaaattacaacagttgatagttcagaagcgcgagcttctggcgcatgagaccttctcgcgtcgtgcctttgctgctgtgaggatatgtctgatgaaatgaagagccagtatgtggaatacttgatcgaacgtctggaaaatgcggaactggataaccgtgtgatgagactggtgttggaggatctgagcagagagttaccccactccaatcagatgttagaaaaatcaaatgagttgcaatctcttcttgaggaagagcgtaacttgtgtaaatccttggactgtgagatataaagctgaaggaacaattcgaatccatctgcaaatactgtttcggttcgaagaaatagtccgtaaaaaggatggttccggttcggatgcacaagatatctttgagtctgtcaccgtaaaatatagacttggctgtatgtcaatagttaaaaatcaattgaatttgatagtatttttttaggcatccattctggtgctttataaaaaggatatgctcaaaattgagtattaacggtatgccctaaacagagtgcttacgattgattgctagtctttcataggttaccttagtaatatgaatatatcttctttgtttgccaaatctatatggtttgggattgtccctaaattaccgacatttataaatatacttatacttcctttagtgaccccttatctgtcagctagcgattatggcgtatgggggattatttcaagttatatgggtatctttatatctatatatactttgggattgcacatgcacttaagcaattcgtattatgaatatggcgataagtatagacttgtctgggggcgtattttgtttctattactattattatctacttttttttcgtgtattctattttttattatttggagtacatttgataatttagattttgataatcgtatattattagctttgttgtctgtttttagcttgcaattcaatgctaataatttgatgggacaatgcctatatacactgcgtggaactcctattccttttgttgtaagaacattagtaggtggtttaattgggattgcggtaacttttatatctattagatacttaagaattggatatttaggatttgttcttggttctgcactgaactatatgttttgtttcttttcttttatctaccctttgtggatgaaagagaaactttatccaagaattgagatatctaaagtaagaattttcaaattactgaagatatcgttaccggttgttcctcatgctttaggatttctgctgttgtcctcttcaagtaggataataatggctctctatgagatacctatagaagatattggcatatattccaatggttatattttaggtgattatataactattgtgacaacagctttggcttttgcacttgctccttatatgcagactacttttagaagcgaaaattatatgtgttatcgtttcttatttttcttgtgtcaatctatagcattggtatctatctttattttttgtttgtggatgccggagatttatagcattttgataagaaatgagagtctgcaagaaagtatggttatttctcaaatatcatgttttgctaactgcgtattcccgttatatgtttttatgtcaaacatctgttttataaagaaagatactatgcaattactctggttagtatttatacccggtcttttgaatattatcttgctcttgatttttatcccattgtttggctatagagttgctgtgattacaaccttgatttcttattggactcaaatgtttatcccatttttcatcaggtattataaggagcaaatttcgttatggttaggtaataggtctaaattggtagaattgtttttgatatctgtttttgcattggtgacatctataattctttcaaagtactttatggctaaattatcgatgactttattaatcatggtaattattatttctaatataagtaaaatttcatataaactaaaatttttgtaggatgaaatatttgttttatggaggttcctctataacaatgcctcatatgggagtgttattaaatgaatctttggctttaaatgaaaagggggatgaaatagtatgggtatattgtaatgctaaatatcaatcttgtatctccaatctgagctctaattctgtaatttgtaagaattgtgtgaatagagttcataggcttttaggtaaatactcaaagcatttgactactatacctttatttgataaaaataagtgtgtaaaagatgcaaaagaatatttgttctgtgatatagatgaattgaaagactttacatttcagggttgtaacctaggttattctatagcatcggcctatatttcagcaacaagaaattctataatgtctttttcggagagacataaacaatattattcaaaattagtttcacaagtaattgagagatttatttgttttgaaaagattgtaaaggattgcagaccagattgtatcgtagtttttaatggccgttattttgatgcagccatatgcatagaaatagcaaggaagcatcatatagattaccagataaaagaagtgctggatggccctagatgtaaaaagccattttttattgaaactttttttaattgtagtgcatttgatatcaataataaaacgaaaaaagtttatgatacatggaatcagtcgtcgctttcagaaaaagaaaaaattaaaattgggagccacttttatgaatggaaaaaaggaggagattgtgttattgataaatcttatgtaaaaaagcaacaaatagggttacttcctcaaaaatgggattcgcaaaagaggaatattgttatattcaattcttcagatgacgaactcgctgctatcggagctgactatgatagttattctttgtttaaatctcagtatgtaggcatttgctctatattagaacactttataggggaacgaaatttctgtttttatctgcgtatgcaccctaatttgtcccaattagataacccttttgtgaatgatttattggagctggctgataagtttgataatattatagttattgcaccagctgaaaaaatcagtagttattcgttgatgaatgcggctgataaagttatttcatttggatctactatgggggtagaggcaaactattggggaaagccatctatactcttgtctgccagtgaatactataatttaggcgtatgttatcttcccagtagtatagaagaattgtgtgagatgataaaggccgatttgcagcctctagctaaggaaggagctctaaaatatgcgttctatttgttggatagggaagtgagatgccatagagcaaattttgttgatatatcgttcattaaacgaaatatgcttttcaaaacaatatatacattctcttatgataaattgttatattcttcttttttagcgagattggagtctttattgtatcgtaaattattttcaaaatttattcctgacaagaataaatttccggagcaaattgttttagataatatttagtaacctcataatgttgtctgagcgaaaaatctattattggatacctttattggtagaggtatgtgcactttataatagtatacttattaggtatggaatacgatacgcatatcttttctttttgatattaggattatctcttttatttagaagaaaagttttatgtaagtctaaaatctattttttttctattgtcatatatatagttagtgtcattttatcttccattttatttttattatctcaagcaaccatatccataattatggggatgattatttatacattgccattactatattggttgctatatgatgaaagaaaaatgctactctattttccgcagcttattttagggctaaaatatccggttttgttgattgctatattaggggttatacaattctatgtttcaccggggatatttggatttataaacttgagtggacctgttgatccatatgtactgaaagctacttctgacgtgtttcctaattggatgatttatctaagggcaacttctattttatcatcacctcaagtttttggtttgtttatggtattgtatgcagtctcattttttctttatagcaaaaaaaacgccttaaatttgatcctaatgtctatttatttatttgcaggggctcattcaggtaataaatcattttttctgatacttctattgtttggggggtattatattttgaatacaagaaatatgaaaagtaaaattatgacacttttagtttcggttgttttacttttagtaatggtttatttttcagatgaggtttcttttttgtctagaatagttagtgtggaaaatattgcgggagaggaaaaagaaggtagattaagtgtttatcgggaattgcttgagaaggtttctttttggggagatggtgctgggactcatcagatcctgggaggagaacagagcgcagaagctactgaaagctattttttacagatattagtagagctagggatgatttcttttgtatgctttttactaatatttttattgggttacttaaaagataaaaaaagtataaacataatgctctttttcatagctctgtcaatggtatttgttcactgctttaatgcgtttgtgttttttataatgtggggttggttttttatattgccaccatcaataaatattggtaaaaaaatctaataatactgttccatattcatgagatacgatttaattttcatctcaacttgtacatctctttctcatgttcattatttattgtcaagtattgcaagcaacaatgaaagtttaagagtgcatgtaatcattttatttcaatgcggttttgatttggatgttgtttatgatacttcttatactacaatcaccaaattgaagtgtgaagaactttgcagtttatcaaaggctagaaatataggtattaaatatataagagaacataatttgatagcatcttatgtgatgtttcctgatgatgacagtacatttgacaaagagttctttgacaattttgtctcagaagtgtattctgatacattgattaacgttttttgtgaggggacaaatataccataccagaaaatgccgcagttaaattatttggaaaaaacaaataattatcaaaatgccatgtctgttaatatgattattcaatatgaccattttatagaaattggattttttgatgaaagaatgggagttggtgccaaatatggagcaggagaggatggtgatttttttcttagaatctgtgaacgatttggaccttttgtatttaatcagcatttacacacatttcatccggcttccgatacgaaatttgcaacaatttctttaaaagctttgattgaaaggtataagaaatatggtgaaggtgtggtctttttgctctgcaaacataaaaaatataagcaggctatacattgtataataatgggaatattgggagctttcaaagctttaataattgattttgatggaaagctatgttttgccagaatagcaggattctattatagaagtaaaatgttacttactttaatcacaaaatgattcacaattctgtaaagttatcttttgtcattgtagaatattattctattgatgaaatcttgctttgccaagatgctatatcccggaatattcctagggaagttttatatgaagttattgtttcatccaactctgtttattctaaaataaaacaagaagaactggtgagagactatagtatgctgaagtggatattcaatgagcagaatggtggatttgcatatgctatgaatcaagggttgaaagtggctagtggtgatgtattagtgataatgaatccagatgtgaaactaggtaagggggttgataggatgtatgcttatttaatgcagaatgattctattggtgtcattgcaccacagataaagaatgtacagggtgtaatacaagatagttttcgtcgttttataacacccatgaattttgtttgtcgccatttgcaccggatgctgggtatggagagagtggaaattgcattaaatatacagtcggtagattgggtgataggtgcatttatgatgataccacgtcaggcttatgaggtagtaggggggctggatgcgcactactttttgtattgcgaggatatggatttgtgcaagagaatgcatctggcaggatattctgttgtttattttccagaggcagaaattgagtatgaggggacacgatcggcaagatattctttgaagtatgcttgtatatttctcaagtcattattgcggtattggaaaaaatttggtatttcaatttagggttataaattgagtagtatatctatactgagaattttgaaaattgagtcatataaaaagcaagaatcggtagaaggaaagtttgttacttacacaagcaataaggagaatttggatattgttattggaaaatgtgatgatattggatgtgttattgggggaggaactattgaacaggcttcattcccatataaagtttgtgttcatatgaaggtatacttgttgttgaagttgaggatatttactttatcaagtatatgaccaataatcacgtttctggtcagtatattttatagaataattccatgaacatattaatcactggaatccacggctttgtgggctccaatcttgttattgccctaaaggaacgtcattgtctttacgggctggatattgttgctcctgaaaaggcgggggtgataaagacttttttctggaaagatattgaaccggcttcttttccgatgtgggatcttcctgaattcgatgccattattcatctggctggtaaagcccatgatatgaaaaatcggtccgcagcccaatcctattttgatatcaatacgggattgacccaaaagatatttaatttctttctggaatcgtctgcgaagaagttcgtattcttcagttcggtaaaagccgctgcaggctgtgtgttgggtgatatgctgactgaagatgtggtgcctgctccggtagggccttatggggaaagtaagatagctgccgagaattacatccttgacaagttgaaggttgagaatgggaaattgaaagctaatccttatgatgacaagcaggtttatatcctgcgtccctgcatgattcatggtcccggtaacaaaggcaatctgaatcttctttataatgtggtgaggaaaggtgttccctggcctttaggggcttttgagaacagaaggtcttttacttcaatagacaatctctgctacgtggtggaaggtcttttgaccaaggaggtggcgagtggtatctaccacatgggagatgacgaagccttgtccacaaatgaactgataactttgatgtgtcgggctttggagcgtaagccgcatatctggaagataaacagaggactgatggaattctgtgcccggcttgggactctgctccatttgcctttgaatgcagagcgcctgcgcaagttgactgagaattatgtggtgagtaatgcgaagataaaggctgccctgggaattgacagaatgccggtgagggcagaggaggggatagtgagaacgataaaatcgttctcaaatataaaagtaaacaattaaaaattaaagaggaaaatactgttatgtattatctgattatattggttctgctgtttttagcagaacttttttattttagagtggctgataggtgcaatatcatcgacaagcccaatgagcggagttcccatacgaaagtgactttacgcggtggtgggattattttctatttcggggcgtttgcctatttcctgacgagtggctttgaatatccctggttcctgcttgccttgacactggtgacgttcatcagcttcgtggacgatataaaatccaccggacagatgacaagactgctttttcatttctctgctatggctatgatgttttatcagtgggggctgttctctttgtcctggtggtggatagtcatagccttgatagtctgtacgggcatcatcaatgcctacaactttatggatggcattaacggcataaccggtggttattctctggttattcttgctgcgttggcctatatcaataaggaggtggttacttttgtggaagcagatttcatctataccgttatctgttccgttctagttttctgtttcttcaattttcgtaagaaagccaaatgctttgcgggtgatgtgggggcggtgagcattgccttcatccttcttttcctgataggcaggctcatcattgaaacggaagatttcagctggatagtccttttatccgtttatggtgtggatagtgtactgactatcattcaccgcctgatgcttcatgagaatatcggtttgccgcatcgcaagcatctgtatcagattatggcgaatgagctgaagattcctcatgtaatggtttcttctatttacatggcggtgcaggcaatcataatcgtaggatatataatgtgtttaggttacggttattggtatttgacaggtataattcttttgctttgtttttcttatacctgctttatgaagaagtatttcggattgcaccagtctacgtgagtaatactgaaatgatgattagtaaaataatgaaaggcgatggagactaaaatctccatcgcctttcgtcttatttttgaaatataaatcgtacctttgtcatataccaatcaggttataataataacatggaacagatgcgtaaactgccgattggcatacagacttttgaggaaatacgtagggatggttatctctatgtagataagacggctatggtttatcaaattgcaaatgtaggtaaaccttatttcttgagccgtccccgtcgttttggcaagagtctgcttctttctacctttgaagcctactttcaaggacgcaaggatctgtttcaaggtttggccatcgaacagctggaaaaggaatgggaagaatacccggttttgcacttggatttgaatgcccggaaatatgaaactgctgctgacctgacggctatgcttaatcagtatctggagaaatgggagctgctctatggtcaggagaagaaagaccgtaatccggaagagcgttttgcttacgtgatagagcgggcatgcatgcagacaggaaagcaggttgttgtgctgattgatgagtatgataagccattgcttcaagcggtcttggatgagaacttgctggatgagtatcggaaaacattgaaagcattctacggtgtcttgaagagcgctgaccgttatcttcgttttgttttcctgaccggagtgaccaagtttgcgcaagtaagtgtgttcagtgacttgaaccagctgaatgatatcagcatgaagtctccttacgctgctttgtgtggtattaccaaagaggagttggtgaaaacctttctgccggaacttgagagactggctaaacgaagagggatatccttacaagaagtgattgatttgatggaacgtcaatatgatggttatcattttcatccggaaggtgtaggaatgttcaatccgttcagtgtattgaatgcttttgatgcagaagagatgggatattattggtttcagaccggcacacctacttacttggttgacttgctgaagcagagtgattacgatatacgtctattgatagatggagtggaagtgctggcttccgctttctctgaatatcgtgcggaaacaaataatcctcttccgatgatttatcaaagtggttatttgaccataaaagggtatgatgatgatgtgaagctatacactttaggctttccaaatgatgaggttcgttacggctttctgaattttctggttcctttttatactaaagttactgatgatgagactggtttccacatcgctaaattcatgcgtgaattgaagagtggggatgtggaggcgtttatggagcgtcttaagatattcttctccggtattccgtacgagttgagtgatgatacggaacgtcattatcaggttatttttcatgtagtatttactttgctgggacagttcatccggtccgaggttcgcagcagccgcggccgtgcggacgcggtagttcatacccctaccgctatttatgtttttgagttcaaactggacggtacagccgacgcagctctgaagcaaatagatgagaaggggtatctgattccttataccttggatggcaggaaattagtgaaagtaggtgtgaacttcagtaaagaaacacggaatattgatgaatatattgtcgtagaggaataggaacgaacaatcatatatatggaaaaggcgatggagaattaattctccatcgccttttccatattataaaatttcaccttatttcttcattctcagcacccgtattcccgtccacttattattgtctttcagcatttgggacaaggggactttggaaacaaccactttcttgtcggtagaagaagcgtgtaccaacaggagtttgccatctgcatagaaagcgattcccatgtgggctacgtccagccccggagtgttggtggtgatggctatgatatcgccgtctttaatccacgggagaccatcggcgggaagtttggctttgggaagatagtgaatttccttgctggacaaggattgttcaatcttcttcattttggctatgttctccggagaatttgccagctgcttgtagagttgggggtgggaagacatgtaggagatggataactgttcggtgtcgggactcatggcgcccgttacatcctgaaggaagccgttgcgtacgccattgtttatccagtcggcaatataatgcaggcgggaagtgtacccgtcgattttaccgtcacggtaacggattttttgcaggttatcggcgaaagcgctttccgagatgtctccgtcggccaatttgggggtgagtgtctctgccagcacatattccaccagcgtggtgcagtctacctcatcgcagttgatgacgagttcttcgggaccatctgcttccagcgtatgggctacgtatggcacatccagatactttattccattgctcaacatatctttccctccctgggcagaaacggaagttaccatggctgcggcgcagagggcgctgaacataaatttagtcattgttttcatttttctctcttttgattattattgttcttaaacgtaaaaaggatgcagcaaatttactacatcctttttataaaagcttaatccggagggattaaattcaatattgctggattaaatatttataatcctcctttttatcgaacggaacaagggagaaaccgtattcaatggcattctctttgcccggacgaatcagatagggttcatgggcggttgcgccccaactgtcgtctccaccgacacccatcatgcggtagtcaatgaacaaatcaaccatcttttccggcagaggatcggtgaggtggcgatgatgggtcttttcggtacgcggagcaccgttatcaatcgtgtcgccgctatccatgctctccaggggatagttggaggcgttcagttcgaaggtgcggtcggcgatgagtagcaagccacgttgcgtcttatcggtaagggcgcaccaatagatgtctgtgcgatggttgttctcttgcgggcggacgtaaggctcgtacatatccttgagcgggatagtatactctccaataaactgggaggtacggcggtctcggtagttttccttcggaccgcgaccgtagtaggtcaagtctgtaaagatcttttgcaactgcatccgcaggcctacacgcggtatcatcgaagcctggtctccttcggccacgaagcggttgtctaccttgataactccgttggcatatatcttataggtgatgtcccaacgggcatctgtctgcggaaaatgataggtcacctttactgtcgtggcattgctgcccggagtcacttggaaactttcggcttttggttcttgatagcttgcctctttccaggctttgaggcggacggggaggttggctccataatcattgtccgtcggtgcacgccagaagaatgggcggggaccttgaccgttcagtatgtactcgtgcttcttgtacaaataggaggtgagtaggccgctttgcttgtcgaaggtggctttgaagtcgggaccgaagaacgccaccaaatttccttcttccttagaagtggcgggcttctgtgccgtagcctctttcttgtagaaggtatggacgtaggtctgttcgcgtgcaatgaccgtgccggccgggaggaaaggttctgccgtcttgatggctgcatagaactcgatgcgtacatctcccgttgtctgtttctctttgggtatgccgttcagaaagccggtggttactgtcttgcccggtgcagcatggatattttcaatcttgccacggtagacttcctttccatggtcgcggatgatgtagtagaagtcgtacttgtcgagattggtgaaagagaaatcattgcggattttcacggtggaagtttgcttgtcgaagtcgaggaacttgatgttctggtagaccttccccatctcttccgtctgcggtttgacactgcggtcggggtataccacgccgttgatgcagaaattgccgtcggagggagtgccgttctcgccataatcgccgccataggtccagtatttacggccgtcgtctgtcttggcggcaaagccttggtctacccagtcccagatacagccgccctggaggatgggatatttttcgatgatatcccagtagtcctggaagttgccgagactgttgcccatggcatgggcatactcgcaaagaatgaggggacgcgtcatctccttgttccgggcatacttctccagataggaagggggagcatacatcgggcagtagatgtccgtattccattccaacagtgcacgttcatactggatgggacggctgtcgagtgtcttcaaggtgttgtaagtgacgtagaaattcaatccgttcccggcttcgttgcccagcgaccagatgatgactgacggatggttcttgtcccgctcgtacatattcatggtgcggtcgagatgggcattcatgaagagcggattgtttcccagcgtaccgcctacccgcaagtcgtaacccatgccgtgactttcgatattggcttcgtcgatgacgtagataccatattcatcgcagagttcgtagaaacgttcctgctggggatagtggcaagtgcgtacggtattgacattgtatctcttccaaagctcgaaatctttcttcatcagttcttcggagacatagtgaccggtattctcgttgtgttcgtgatagttcacgcctttcacgaggataggttgtccgtttaccaacagttgcttgtccttgatttccactgtacggaaacctactttgcagcttgtcgcttcaatcacatctccgttcgggcgcttcaagctgacgacgagggtatagaggttgggcgtttcggctgtccattgcaggggttcctggatggtcttcttggtgaattccacttccgtttggtcaccgctgacctgagtagaggactgggctatctgctggtcgttcttgtccagcaggcggtaaccaacgacaaatggggcgttttgtccgctttcattggtaaactgcacctttaccttgaggataccgttccggtagttgtcgtccagaggagcttccaccttgaagtctgtgagatggatttgaggctgggcatataagtaaatgtcccgttcgataccactgatgcgccagaagtcctggcattccagatagttggcatcggaaaagcggtgtatctgaatggcaatgacattcttccctttcttggcaatggcgctgacgttgaaacgcgccggagtctttgcatctttactcatgcctacaaacttgccgttaaggtagtagaaggctgccccgcgtacaccgtcggcactcaggaaaatctccttatcgtcccagtctcccggaagggtgaactcgcggcgataggtgccggtgggattccattccttgggaacgtacggagggttgggcttgtcccaataaggaggatagcccgaagaacagaactcatagggatggttcacgtagatgggcgtgccgaatccttgcaactcccagtttccgggtacattgatgtccggccagcggctggcgtccacacggtccatcatgaagtccgtggggcggtcggcgaaggtttccacataatggaatttccatttcccgttaagggacaagcggaatgttccgttcttgcggtcattgatgacggcatcggcctccgtgacgtaggaggtgaacgtgctgcgggcaggctcccggttgatgcttgtcagcttggggttggtaatctcttcgtagcgattgttctcctgagcagtcagggcaaagggaaaagctgcgaggcaagtgagtaaaaaatactttttattcataattgcttttatttctttgtggtaggttcagagaccgggaatacgagcccttcacgcaaccacttctccagttcttccgtccattgacgcttgtaggtgaagttgtcccggaatccccagccatgtccgccggtagggtaggcatgcaggctggcaggcactttgtggtcacgcaaggcgaggaaatagccaatgccgttgatgggtggcactgcgtcgtcgtccgaagaaagcatgataaaagcctgcggagtgcgtggggacacttgtctttcgagggagtatttttgttccagctcctgagatggattttctccgataaggttcttacgggaacctccatgggtaacgcctttctgcatggaaatcaccggatagaacaagatctggaagtcgggacgggtcttgtcactgctgtatagtgtggcaagcgaagctgccagatggccgccggcagaagcgcccatgatgcctacacgctgaggattgacaccccattcggcggcatgttcgcgtaccatgcggatggcttgttcggcatcggaaaggggcacttcatggtgcccgttgggcatacggtatttcagtactgcataggtgatgccttgtgtgttgaaccagggagccatgtcgtgtccctcgtgcttcatggccagccccccgtagccgcctcccggacacatgatgatggccatgccgttggggtgggaggcagggtacaccgtaagggtagggggggtgacatcggacacccattcgttgttatggttctgtccggaattggtcagttcgttgttattgggggcaccgttgggccataggggcagctcaacgggcttttgtgcagataacatggtcgctgcaaatagaaaagataaaagtagaatctttttcatgttcttggtatttaaaagttatttggttttcatggaagctttgatgaggtagaatatcagaatggcataagcacccagcgccagcacttcagaccaagtgttctgcaaccatgcatcgttcacgaggttgattcctccgaaacgcatggcagcacttgccacacccattaatgcaccgccggcaatgaaaccggaggcaagcagggtacctttctccccgcgttcggcattgagagcggcatccttgctgcggctggtcacgtaccagttgatggcaccgcccactaccaacggaacattcagttccaatgggatgaacatacccaatgcaaatgccagtgcgggaatcttgcagaaattgaggatgacggccagcactgcaccgataccgtagagcggccagggcgcacccacaccgttcatcaacggttcgataacggccgccatggcattggcttgcggagcggccagctgtccgctggtgaaaccgtatgtcttgttcaggataatcattacaccacctacagtagcggcagaaacgatggttccgaggaacttccaggtctcctgcttggcaggcgtgctacccagccagtaaccgattttcaagtctgtgatgaagcctcccgccatggacagtgccgtacatacaacaccacccatcaccagtgccgcaaccattcctccgggacctttcagccctacggctaccatgactacggatgccaggattaatgtcatcagcgtcattccggatacggggtttgtgcccacaatcgcaatggcattggctgccacggtggtgaacaggaaagcgatacctgcaacaagcaggatagctacaatggtatgtgtcaagttgccctgcatcacatcgaagtagaagaagagaacaaccagcagcagcgtgatgatggaaccgatggcgataatcttcatagagatgtcccgctgtgtgcgtttcacactggcttccacgttggacttacctcccatttccttggcagccagtcctacggcactcttgatgatgccccaagacttgataatgccgatgatacctgccatggcaatgccaccgataccgatgctcttggcatagtatttgaagatttcttccggagccatagcgcctatggttgccgtgatttcggggttccattggttcagtacggaatctccccaaatcatggacataccggggatgataatccaccatacggccagtgagccgacacagatgatggacgcgtatttcagtcccacaatataacccagaccgagcacggcagcacccgtattaaccttgaataccagcttggctttctcggccagcatttcgccgaagccgcatacgcgggtagtgaaattctcgttccaccagccgaaggttgccacgatgaagtcgtatagacctccgataataccagccatgagtaatggttttgcctggcttccgcccttttcaccggagacgagcacttgtgtggtggctgtcgcctcggggaagggatacttgccgtgcatgtcgctcacgaaatatttgcggaaggggataaggaagagaatacccagcacacctcccagcagggaactgataaagacttgtgcaaaggtgacggtgatttctttcggataggtctcttggagaatatagagtgccggaagggtgaagatggcacctgccacgatgacgcccgagctggcaccgatagactggataatgacgttttcgcccaatgcgtttttgcgtttggcggcacccgatacgccgacggcaatgatggcgatggggatggcggcttcgaatacttgtcccaccttcagccccagataggcggctgcggccgaaaagaggatggccatcagaataccccatgtcaccgaccaggcatttacttctgaatacttcttatccgggctcatcagagggttgtacacttctcccggtttcaattcacggaacgcattttccggtagtccggtaataggttcttcttcttgtttcataggttttgtagttttatgtttttctttaatagacttcaaagaaagcaaaaaaaaaggagatttaaaaaaatctccttaattctgtatggtaaaatgcttatttggcatctttagcggtcatgtccccttcgataaataatcgcatgatttccgttttggcattggtgcgcagggtaatggatttcttgaagtgtccggggtatcttccggttccattataagttactttcactgttcctgtctttcccggtgctatcggttcttgtgaatattcgggaacggtacatccgcaggaagctacagcctgatggatgacaagcggagcatcgcctacgttcgtaaacttaaaggtgtagctgaccacaggactgttttcggagaatgtgccgaagttgtgggtggtctgttcgaatttgatgtctgcctttccttgtgcataggcataaccgatgctcataaccagcagcatcatataaaaaacgactttcttcatgttcttatcttttttatatttcaacggcgcaaaggtaacccattttcattaaaataatgcctatggcgtgcgaaattgtattaaatcgggctcaaaaggcctttgggcgaatgataagcaaggaaaaataagggaaacggatggccgctatccgcttgctgtcattgatatacttctcttccggagtgcctacattctcaaaatagtgataccggtattcgggatgcaggcggatgcagcggtgaatctcatcggtgcatctggacagcttcatgatgacaaccgcactgttttcgcttgtcagtctttctatctcttctgtggtggcgataccgggtatcaccgtcagccgctcttcctggctggctacatggagcccgcccagtgcgccggcggcaatgaaggcggggataccggggatgtgcttcacggggatgccgtctgcctgcagtttgtcatatacatagtgtatggaagagtagaatccggcatctccttcggcaacgatgcagactttctttccttgttgccggagggtggagctctccatatagacctcgtcgtaggcgctcagggctttttcgcgctgtttgctcatggggagtggaaagcggcgcaccgtgttttccggaatgtcaagttgcaataggatgtcggctgcgcgtgaaactctgtttccatctttggccagtgtctcgggacagaagatgcagtcggctgtctgcagggctttcaagccttttacggtaatcagctccggttcgccgggaccgagagatacaaatatgacggggaacatttgcatgaagacattaaaggttaaaaattaaagaacagcaaaacggctacaaaagtggggaaataatcagtagcaaacaagatattcgctatctttgttatttactaaaacaatctgttttttatggattatcaactgaacacccgcttgaatggcaacatagccatgacttccagctaccatgagcgtgcgtcgctgcaacgtgacaagactctgtataaattcatttgggtacagagcggtacgctgactctggaaatagaccatatccccatgcgcctggaaaaggatgaaatcgtgaccttgaccccgttgcatcacctggaggtaaaagaggtggacggtgaatacctgacgtttgtattcaacagcaatttttattgcatctatggacatgacaacgaggtctcttgcaatggattccttttttatggctcttccaaggtgatgaaactggcactttctgccgggcagtcttccaacttgcatgacatagtccgcattttccggcaggaatcggtcatccatgacaacctgcaggaggagatgctgcggattgtcttgaaacgtttcatcattacctgcacacgcattgcgcgccagcgttttggggtggggcaggagaaggaaaagacgtttgacatcatccggcagtattacgtattagtggaccggcatttcaaggagaagaagcaagtgcaggattatgctgatattctttgccgttctcccaagacactttccaatctgttctcgacctgcgggttgccttcccctttacgggtgattcatgaccgcattgaggcagaagccatgagattgctgctgtatacccacaaaagcgctaaggaaatcagctccattctgggcttcgaagacttgtccgcgttcagccgttttttcaagaaaatgaccggcgagagtgtctcggactaccggaaaagagtgaaacgggaagaattgccaactgttgcggaataattgccatttcgtacgtggtggaaaacaaggaactttgcaaaaacaaaaatcaagtcatattactgaaaccatttaaaaagtagaacaaagatgaaaacgaaattgcaaaacttgtttatggctgcgttgacgctggccgcttccactcaaaagttgggtgttaatttgattcgtgtagccatcctggttattttcgtatggattggtgggttgaaattctggaattatgaggctgaagggattgtcccttttgtggcgaacagcccgttcatgagcttcttttatacaaagagtgccccggagtacaaggagtataagctgaaagagggcgagttcaatgaggcgaaacatcagtggcacgtggagaacaatacgtatggtttctcccacggtctgggcattctgattatggccatcggcatcctgacatttctggggatattctctccgaaaatcggactggcgggagccgcacttgccattgtcatgacgatgggtaccctctctttcctggtgacaacccctgaggtgtgggtgcccgacttgggaagcggggagcacggctttccgttgctgacgggggcagggcgcttggtcatcaaggatacggccattcttgccggtgccattgtcgtactgtctgacagtgcaaaaagagtattgaaccaattaaggaaatagacgtatgaaacagtatgatgccattatcatcggattcggcaaaggcggaaagacattggctgccgagttggcaaaacggaagctggacgttgccgtagtggagcgttcggaaaagatgtatggagggacatgtatcaatatcggttgcattcccacaaaaacattggtgcatgcggcaaagcatgcggacaaagacgcttcttgggaggtcaagaaggcatactatcgtcagtccattgcaaggaaggaagaggtcgtctctttcctgcgtcagaagaattatcacaatctggccgacaatcctcatataacggtctatacgggtatcggctcctttgcaggtccggatgtggtggaagttgggatggtggaagggacattacaattgcaagctccccggatattcatcaatacgggtgccgaaaccgtcattccaccgatagaggggatacaaggtaacccacgggtatataccagcacctccattatggaactgactgagctgccggcacagctcgtcattgtaggtgggggatacatcggactagaatttgcttccatgtatgtttcattcggttcgcaagtcacggtgctcgagggctcttccgaactgatatcccgggaggaccgggacattgcggacagtgtccgggaggtattggaacagaaaggaatcgttttcaggctgaatgcacgcgtgcagtccgtgaaagactctgacgtcatttaccgggatgcggtcacgggagaggaacatcagttacacgcagatgccatcctgctggctaccggccggcgtccgaatacggctggcttgaatctggcggcggcaggtgtagaggtgaatgagcgcggtgccattgtggtggacgactatttgcagactaccaaccccaagatacatgctatcggtgatgtaaagggcggtttgcagtttacctacatttctttggatgattaccgcatcctgcgcgaagaccttttcggggcaggagaacgcaaggtgtccgaccgtgacccggtgagctattcggtattcatcgacccgccgctttcacgcatcgggctgagcgaagcggaagcacgcaagaagggattgaatataaaggtcaacaagctgccggtagccgccattccgcgtgccaggactttgggcgatacgaacggactcttcaaggtggtggtggacgccgatacggacaagatagtgggatgtacgctgtttggtccggaatcgagcgaggtcatcaacctggtggcaatggctatgaagaccgggcaggaatataccttcctccgtgattttgtctttacacatcccagcatgagtgaagcactgaatgacttgatgggcttttaaagattatttaggcacaatatccgtcaatttgcaggaagagcatttgcgtatctccccaaaaatgacgaatattgtgcccgaattctataaaccccaatagtcatgacccggatatctgccataggcattgcactgctgtgcattttatgcgtaacctcttgcggcttaaaatcaagacagactactaccgaatcttcttccgaaacgggctattctccggttatgacagacacggcagctaccattgtaccgctttatgccaaaggctatacggtgaagtacttgccgcaccatgtccgcctggtggatatacacgaccctcagaaagaaaacggcaacaccttccattacgcactggtaccgaaaggcataaagcctgtcggtataccgagcgactatacggtgattgaaacgccggtagagcacgttatgtgcatgacatccctgcaactttccaacttcatccgtctggatgcctgcgattatgtggtgggcatcaccagtacgcgccatctcttcaacaaggagatgaacgaacgtttgaagtccggcgagaccgtgaagattggtatcgaagggaactttgataatgaagtgataatgagcatgaatccggatgttatctttatctctcctttcaagcggggcggatatgatgccatgcgggaaatcggtattccactggttccccatttgggatataaggagatgaccccgttggggcaggctgaatggataaaattcatcggcatgtttataggccaggaagtggaggcgaatgaaaagtttgctgcgatagagaagcgctataacgaattgaaggagctggctgccaacgtgaagaagcgtccgatggtattcagcggcgagatacggggtggcaactggtatgcagtgggaggaaagagctttcttgccgaactgttccgtgatgccggtgcggattatttcttgaaagacgatccccgttcgggaggtgtcacgctggattttgaaaccgtatatagccaggcggagagtgccgactattggcgcattgtcaacagctatgacgggacattcacgtatgatgccttgaagtccctcgacccgcgttatgccgacttccgtgcgtttcgtgagaagggagtggtatactgcaacatgcgtgagaaacccttctacgaaagtatgcccatgcagcccgaaattgtattggaagacttgatacatgctttccatcccgatttgttgcctgactataaaccgacttactacgaactgctgaaatgataaaaagacccgtacttccgttgatgttgctgacactggcatctatctttctttttttcctgctgaacctgcttttggggtcggttcacattcctctgcgctccgtgtggaacatattgtggggaaatacggatgaatccgttatttggcagaatattatctggaagtcccgcgtgccccaagcgttgacggcattggtggcgggagcagggctgtcagtcagcggtctgcagatgcagacggtgttccgcaatccgctggcagggccttcggtattgggcatcagttcaggtgccagcctgggtgtggcttgtgtggtattactgtccggggcgatgggcggtgtggcattgagccgtttggggtatatgggcgaggttgccttgtcggttgccgccattatcggtgcgctggctgtgatggcgctcattgtctatgtctcccagaaggtgaagggcaacgtgacgctgctgataatcggtgtgatgataggctatgtggcaagtgccgtcatcggcgtattgaaatatttcagtgtggaggaagatatacgtgcatatgtcatttggggattgggtagctttgcccgtgtttcgggcgaccagatggtgctgtttgtctgcatcatggctgtgctgcttccgttgtccttcctgctgataaagacgatgaatctgttgctgctgggcgatggctatgcacgcaatctgggactgaacatcaagcgggcacgcctgctggttatctcatgctccggcgtgctggtggctattgtaacggcctattgcggtccgattatgtttatcggattggcggttccccatctgtgccgtgccatcttccactcttcggaccatcgggtactgatgcctgccacattgctggtaggcgcttccctggcattggtctgcaatctgatagcccgtatgcccggcttcgagggagctttgccggtcaactcggtgacggcactggtaggtgcgccggtagtggcttctgtactttttagaaaacggaaaggagaattgaatgaataaggaaaccatacatatagagaatctttccatcggttaccccggtaagggggatgtgaaagtggtggcagacggcatttgcgccggaattaacagtggtgagctgacttgcctgttgggagccaatggagtggggaagtccacgttgctccgtacgctgtccgccttccagccgaaacttggaggaaacatatttattgaaggaaaagagataggggactataccgacaagcagctttcgcgcgtcatcagcgtggtgctgacggagaagtgcgatatacgcaatatgtccgtcgtagaactgataggtctggggcgtagcccctacaccggtttctggggaaccctttcgaaagaggacaagattgtggtggacaaatccatcgccctggtaggcattccccatctggcacaccgcatggtgcatacgctgagtgacggtgaacggcagaaggtgatgatagccaaggcgctcgcccaggaaactcccgtcatctatctggatgaaccgacagctttccttgattttcccagtaaagtagagatgatgcaactgcttcaccagctcagccggcaaacggacaagacgattttcctttctactcacgacctggaactggccctgcagatagcggacaaaatatggctgatggacaaggtgaacggcgtaactatcggtacgcccgaggacctttcgttgaacggcagcctgagcaacttctttgcccgtaagggtattgcctttgatttggaaacgggactgttcagggtagccaatgaatatacctcccagatacgcttggcgggccacgggcagaagtatgccatggtgcgcaaggcactccagagaaacgggattctggcaaaccggaatgttgaatcggagatttatatcgaaaccggagatttgaagggagacggcagcttcgtattccatcgaccgggcaaggagccggtaacagtgtactccattgagaaattgctgcaaatagtcttgtcattccattccctatgatgcaccattctgcaaaggataattatgtccacttaacgacgactccggtcccccggctgattacgtcattggctgtgccgaccatcatcagcatgctggtgacgtccttctacaacatggcagatacctattttgtgggtaaaataaatacccagtctacggctgccgtaggtatcgtgttttctgtgatgtccattatccaggctgtgggattcttcttcggtcatggttcggggaactacatctcccgtaagttgggggcgcaggaaacggagagtgccgagaagatggcatccaccggcttcttttttgccttgtttatcggagcggctctggctgtgctgggattgctgttccttacaccgctttcccttgctttggggtcgacgcctactattcttccgtatacggagcgctatttgggaatcattctgctgggtactccttttatgaccgcctcattggtgctgaataaccaaatacgttttcaaggtaatgcggcgtatgccatggtggggattgtgagtggggcggtcatcaacgtggtgctcgaccctatcctgatttttgtatgcgatatgggcatatccggtgccgcacttgccacagtagtcagccagatatgtagtttcatccttttgctatatatggggcgcagaggaggaaatatacgtatacgttacagaaactttacgcctacactggctttcatcaaggaaattattgggggtggaactccgtcactcacccggcagggactggcaagcgtggcaaccattttgctgaacgtggcggccggtgcatatggtgacgcagctattgcagggatgtccattgtgacgcgtatctctatgtttatcaatgctttcctaattggtttcgggcaaggcttccaaccggtatgcggattcaattatggtgccgggctgtatgccagagtgcgccaaggattctggttctgtgtgaaggtaggctttttctttttgctggtttgtgcggtggcaggtatgggatatgccgaggagattgtctccatcttccgcaagggagaccctgctgttgtagctaccggtgcggcagcattgcgctggcagttcatcacctatccgttgggtgcatggattgtggtcagcaacatgatgctgcagactatccgcaagcccgtacgcgctacgatactttcctctgcccgtcaagggctgttcttcatccccctcatcttcattcttccttatttcttaggactgaaaggggtggagatgtgccaggcggcgtcggacatgctgaccttcttcctcgccattccattgacctgcggggtgctggcggagatgaagaggaaggaggcggaacaactgcaacagcggcaatcttgaagtttctgcgtccctattcaattttcacgggagctatcggttgccgcttcactttatcgaggggagctgcatggtactcgatgcgcccgaagtctatctgtctcaaatcaatgcttctgattgtactgttgtacatggtgcgatagtagatgataccgtttgtcatatctgtggccgatgtccattgggtggcacttggaatattggcaggaacctggccgaggggaaactcgatgcctacgggtatatcaaagttattcagtatctgaaaacattggagaacggtttcctgtgcggtattctgtggtggtgtagaagtctggtagaaagcggcacggataaagcgggaagggggagtcacatctcccggaattcccaaaaagccgcttcccgaaccgaaaggggctatagtcacattgcccagcgatttgctttcggcactgcccgggtagaggttcacataattgtttaagttggtcatctgccagtcaaagccgggggagtttgtcaatactcccagtttgttttcatagaaacggggctgtccgtcgatgaactccaataccagttggcggccggtcttgtctgcaatccgccaatgtacggtggaggcgcgtgggtcaatggctatgaccgtcacattttcaatagcctcctttacctcgtccacagtagaaaagcttcccaacagccatgataccaattgtaaatcggctatgctcgacgcttttcgtgtggggtcgtactcctcatatttgccatatccgggaaagtagaacagcccggcggagagcccggcttcattcagaccttcggccacgaactccttttgctccactgccaggcctacgtagccatagcgtgaggtgaactccatgccggacagactgcctccgggtgtcagtgattgttgcgaataaccgcgcggtacgatgacgtactggctgttcagctcactgcctccccattcgatggtgcgggctacgacgtgcgcattgtctttggccgtcagggtgataccggtacatgcctctgctgtttgaggggcgaaggtgagggctgtcattgctgccagcaggataggaattctttttgccatattattcagtttatattgttgagtatctgtttgtatactaaacaactctgtatggcaaaatgttcccttaccagaaccggtaccccagcgtaaagaatgcggcgaagttcttgggaaaatatcctccttcttccgaatgacctatcatctggtttatctgctcattgacttttaccagtcccacttgtgtctctgcaccgatgatgaatcttctgtattcaaaagtaagtcccagggcaatacctgcatcgaaacggttgttacccattttcccgtctaccatactgccgaaagtgtctatcttgaactggtatcctccctgcatactgctgctgctataatcgtaggtctcgccggaggtcttgcctgccacgcctatggccgcataagggccgacgctcagcgaggcatgataatccctgcccagatggaggcgggccgctatcatgagggggatttgcagatacagttcatgcattttggccttgccgatgtggcttatctcgtctttaccgccgatggacacaaactccaatgcggattgcagcacccaggtcttgttgaggacatattctgcaccgacaccagctttgtaagctatttgggtgtcactactggagtgttttccatgaaaatgggaggtaccgattccagcttttgcatgaaaggacagcgggctttgtgccagaccggtcagtacggtcattgccatacagacggtagtgattatcttcttcttcatgagtaaatttttccgttttcggttatgagtaatactgttagttcgccattgggcagtaagggggcacagtgccggtgacagagctcaatcagtgccttgccaaacttttccagcagctcttcgggaatgatgtcccagagttcgcgcgccaggttcatctgtccgatggcggcaagtgtttcttcgctgcatcccgtctggcgtgccaggtcttgaatgaattccttattcatggtcactttcttgctgtgggtatccagattgccttcggccagtttcacggcctttcccatcatcacgccgagggtgacgtgcggtacttgctcttcggctgctattttcaaggtttcgccgataaagttgccgtaatgcacgaaagcctgggtggggaggtcgggataatacgccttgatgaaacgttcgctctttgcgccggagctgatgacgatacgagggttccgggttgcctttgccacttccatggacttccggatggaattgatgaaggcttccgaggagaatggcttcacgatgccggaggtcccgataatggaaatgcctccttcgataccgaggcggggattgaaggtgcgtttggctatttcttctccaccggggatggagatggtaatgagaataggattgggctgtttggcaatatggaggcgttcaagccatagcttgacgttcttctttatcatttcgcgcggggtgtcgttgatggcagagctaccgagctcaagtcccagaccgggcatggtgacgacacctacgccttcgccgccgcagacgatgatgttgtagtcgtcctggggagtgtcttccggcagcgggtcgtctatgcggaaaggtatggctatattggccacaactttcattccgttggtgatgtccgggtcgtcgccggcatccttgatgacggtagcgcttgtctcgaacatgccgtcaccgttttccagaaggtcggagtggggaatatggcgctgaggctctacgggaacctggatggtttctccgttgggaagaactaccggaaattccgtaggacgctttttgaagtagatattgaatacatcccaggtggcggctacggcggcagcggcggcacatgttccggtggtcagtccgctgcgcagggggaagaagtcgggtaaatgtttctcgattatgcggcgcaggccatgctcgccgtttacacagataaacttgtcggatgtcttggggcggcagatggcaaagatgcgtatacccagttgccgggcagcttccaccttttcgcagaatccgcccgatatcccgctttctttgaggaggatggcttcgggatgaagctgtttcatcaggacttgctcgtcttctccgggcgtgtagtagtagaggttcttctcggagaaaccttgttcccgggcgagcttgcgcgagctgtcacggtcgaggatgcggaagtaacagcaggcattctgccacaaaggcttcagcttacctatggtctgtacgccggtcagtgcaagtaagatgaaaatcttttctttctgtatcttctcgatggcatcgtcataatccctgcaccaggtgatgtgttcttcatcgcgtttcgggaagatacgctcgaaacggatgacggggatattcgattccacggagacttgttccagagtctcatgcagctgtgtggcaaaggggtgcgcggcgtctatcagcagctttatgtgatgctgtgcacagaatgtttctatttctattgcatccatcgcgccttgcaggcggatgccattatgcagaagtacgtcctgctcatcccctttggtagaatagtagaaagtttttccggcttcttcaagggtttggatggctatgcgtccttcggtggttccgccaaatattaatatcatgtttgaatgtttatgggtgattaatcgttgatttatttccggtacagatgcttgaactcgtgtgcatagagccgtgacagaccttcacggttgccgatggcttcgcctacgacaatcatggttgtcaaggtgaggttattttccttcactattctggcaaggtctttgagttcccccctgaatatttgttcgtctttccatgtcaagtggtagcagacagctacgggggtagtttccggatattcctgcaacagttcttcctgcacctgcttcgcaatgcttgcactgaggaagatgcacatggtactttgtgaacgtgccatgagatgtagcttttcgcgttcgggcatgggcgtacgtccttcgccgcgtgttaggatgatgctttgcactttttccggaatggtgaactgcgacttcaaggcagctgccgccgcctggaaggaggatatgccgggggtgatgtggtagctcataccgtgctggtcaaagtagttcatttgttcctgaatggcaccatagatacaagggtcacccgtatgcaggcgtacgatgaattttcccttgtcatagaacttcttcatcacttcaaattgttcttccaaatccatggaagcggagctgagtacggtagccccggccttggcacagagagtcagctccctgggaacgagactgccggcatacagaatgaggtcggcgcgttccagcatttggcgtccgcgtacggaaaccaggtccgggtcgcccgggccggcacccactatttcgatgtggccctggcgcacagttcttatgtcaagggcggcggccacggtatagttctctcctttcttcttgggcaccagcagccgggagttgtttgcactcagtaaggcggcggcttcgctgacgctgggggtacccatgtgcttcatgacggttttgctgggatggggcacctctatctctgccagttcctcggctgtatagaagtagaccgggaacttcttttggagcgctttcactaccggttcgtcacttttggctttaatcgtggagatggaggcgatgctttggggcatgatgccgtattccttcagcgtgttcataatctctttctccactttccgcacgggacctgccagccgggcaaggccgatgccgaggtgtacgacacagggcacgtagcatatcataggcatttccgggaagttggggacttggggagatacgcacagaatcagtttgaagcgtgaaggtttaatgtcctgcacccggtagaatacttctacatgaggcggcaggtgcgcctccatccagtccgtgccttcattgcgcaccgtgagcagcagggcggtgggcttgccagaaacgaagaggctgatatgctcgttcatgcatactctttttttctcttcgggcgtcttggcaagttctgccaacaggagggtggagggctcggcgttgatgaccggaaaccacccgaaacgttggggcagggtatcgagtccccatagaccggtgcagtcgctttgcgtggtgactaccggttcggccccgaggatattcgctacctggtgggtcagttcgttggctcctccgatgtgtccggaaagtacggagatggcaaatttaccggtactgtccacgcaaaccacggcagggtcggtatatttgttcttcacgcaaggagcgatggtgcggacacagattcccatggcgccaatgaagacaaaggcatcatagcggttgaagttttccgctgtgaatttgccggcggattctatatgtgtgcatccctcttcgtgcctgagggtgaagatttcggagtcgggaagttcgttgagtagtgattgggctatgctcaaaccggcttcggagattagaataatagctgttttcataatgggtatgtttaagaaagcgtggctttcataatttcaatggggttatattcgttcaaggcgatatgggtggaagggtggagcaccattccgttccgctcgattcctcggaggaacgcctccttgctttctgccgatacggagttgaagacgatgcagccttcggggtgcagcacttgtttcactttctctatcatttcctccagatgtccgccgtgtccaccgatgaagacggcatcggggcgggcaaagggagtgaggtcggtgtgcaggaaatctccggttaccgccgtaatgcccggtgcgccgaagcggcgggagttggtgtccatcagctcttttccttcggggcgtatctcgaaggagatgacggcgagatgaggaaattgcaggcgggcttcgatggagacggaaccggtacagaaaccgatgtcccagaagacgcggcggcggttcagttccaatgcctgcagggtgagcaggcggatgggagccttggttatcatgcgggcgcgtccgtcaagatgtgcaaactcttcatcggggatgccgaagggacggactggaaagtctggggcttcgctaccgtgcagggagtttgtgcggcattgtccgggatggctgtccagcagcaggcagttgggatgttcgaagtcaccggaaaccgcttcctggggtgtcatccggcgtatgcgttccttttcgggattgccgagatgctcgccgatgtatagtgtgtagtgggagtacccgtattccagcatgcgggcggcaatggtggccggggtatgttcgcggtcggtgaggatgcctattttgggggcacgctctatgagggcacggtcgaactcctgccaggggcgtcctgtcagggagacggtgcgcatgtcgtcatacggcatgacgaggcggtgtgccaatgtctgcaaggaattgaaagcgggatagagcagaatgtctgccccgggaagcttgcgctttatggtattggcaaaaccgaagaacaacgggtcgccggaagcgaatacaatgatggagtcgtccgtcgccgtctcttcgaagcgggcaaatattttttcataacgggaaaagacgcggtccagcggtacggtgatggaaatccattcggccccggcaggcagcagaggaccgacaatctccttatgccgtatgccaccggagaaaaccttccccttccgtatctgcgccagtgcttccggtggaaagaagggggaacggttgtcatccattcctatgattataaatctgtgtttcattcaacgggtaatcttatgaaaatatcaagtaatgtaaaggggcataacaagtaatgttatcggtcgtaacaagtaatgttatggaatgtctcttttcacttacacatccctgcccgggcgcaactgctccgcatcgttgtagcacaacacggagttcaccagcgtggcagccaagttgctgcctcccttacgtccttctacgataatcttgggtatttccgtaaagggtttcaccatgtgtttggactcttgcacatgcacaaagcctaccggtgcggcaacaatgcccgccggatgtgccttgcccttacgtatcaggtcgcagagttccataagtgccgtaggtgcattgccgaatacaaagaaagcatcgggatgctcctccacagccaggcggatgcctgcctgggtacgggtgatgcctttctctgcagccatcgtcgccgtgtgcgggtcgccgaggtaacatttcacctctatgcccagccgctgcaaagctcctttgcggataccgctggctgccatcgtgacgtctgtgacaatcgtcttgattccgcctttctcgatggcttgatacaaggaagccacggcaccttcgtccgtatgcagcagatgctccatttcaaaatcggcggtggtatgtatggcatggagtaaagcccatttatggtcgaggggaatatgcttgttcttcagttccttttcgatggtacggaaactacgaatcatgatgtcttgcccgatgcccgtggcttcggtattcgtgtcccggtaatagccgcgcggagtgatgaaggctccgttccattcgtaggactgtgagttgcctatcaatacgactgtaaacatatccacctcttcgggattgaaatctcccagcgtggtgatgtgtaccgcttgttccgggcgtcctgcctggcgtacatatcccacgggcgtttccggtgagcgtccttcctgcagaaagagttctttcaagcggtaaagctgccagtagcgtccttcacttttggggttgtagactgccgtcacgaagtcggcggcagcggctgcgatgatacgcctttcaatacgctcccagggagtcatcaggtctgaaagggagatgacacagaagtcatgtcctacgggagctcccagcagtgaggctgccttttggaaagcgctgatgcccggcagcgaaatgatttccacgtcgctgttcctttcccgcttcatctcgtagacaagcggcgtcataccataaatgcccgcatccccggaactgatgacgcagaccgtctttccctgctctgccagctcgaaagcctgctcggcacgggcgcgctcacgcttcatgccggtatctatacatgctgttgaggggtggagataagggattacaaattggaaataatacttatatcccaccactacatctgattcttgcaaagcggaaattacggcgggagttatatccgattcattgcccggtccgatgccggcaacaattattttggggtgtttcatatccatatgttctattggcatacaaagatagaacttatatttgatgaaaccgaaaaaactctgtgttaatccgcgtaatctgtggtgaatccttattgtctaaacctgtaagtgccggtattcgctcggagtatagcctacgttcttcttgaacacgcggttgaagtgctgcgaatactggtatcccagctcataggcaatctggctgactgtcttcccgcttcctataatcatttctttggccaggtcgatgattttgttctggatatattcctgcgctgtctttccggtttccttcttcaccaaatctccgaaatagttggaggagaggaacactttgtctgcgaagtatttcacggaaggcagtccttcggtctgcggtttgtcgctctggaaatagtcgtctatcagtgcttcgaatttcatcaggatatctttgttggctgccgagcgggtgatgaactggcgttcgtagaaacgcatgcagtagtccagcagcagttcgatgttgcgtgcaatcagacccttgctgtgcttgtcgatggggcgttggatttccatcttaatcttcttcagacagtcgaggaagatttctttctcgtcttcggacaaatgcagtgcctcggtagaggaataggaaaagaaggaatactgctttattccctgtcccagcgaggtgccttttatcaagtcggggtggaacagcaggccggaggcgctgggctgcataccttccagcatgttgacctcggtcacctggcccggggcgaagctggttaccgtgccttcctggtaatcgtaatactgttttccatagcgtatgtctccgcatttggtgtttttgaggaaaagggcgtatacgccatagttcaaggtgaaatgcctgggatatccggtggcttcggacaaatcgactacgctgaccagcggatgcagggtttcgagaccgaacatcttgttgtattggtctacagcattgagcttgattacttcttccataaacgttcctgttagttttgtacaaatgtagagaataatccggaaagttccatattgcaggaggaggaatccgtaatatggttacaaatgtccgtaatctgtgtacattgaaaagagctacaccctttgtccggaatggtgtagccatccggagcaaagggtgtagccttggtatgtaaaaggtgtagcccttttacgcttgctggttatcaatcttttagcatggctttgatgtgttccatatagagctggcggatggctttgttttcgcccagtccctgcatgcgtacattcacttgatagccttgcttttcaagttccgtcttccacacgccggcaatatcttccttggtatggttgccgcataccaacagcaacggaaccaatgtcacgctcttggggcgtgtctctttcagttgcagcagggttgcgtccagggtaggatatccttcaatggtgctgacgtggaagttcttcagtccatgggctttcatcatgaagtcgagcatggcgtaagtagccgtgctgggtagctggttgccgtgccccacatagacaatgtcttctttcttttccggctgttcggcggtcagtataccgattaccttctcgcagtcttcgacggagtagagcaggggatttcccacttttatctccttgaagaagggacggagcttgtctgcatccctgcggacggaggtcatctcactgccttctatcaaggtggtgctctggacgtagatggtctggtagccttcggcgcgaagtttcagcagtgcatccgtagggctgtctttgtacacaccctccttggcaagtctttttcgtacaatcggcgagatgtatgcttcgcgcactgtaaactgcggaaaggcttcttgtgcctcacgggtcacgacgtcgagcgtcaaggcacgtgtctgagggtccgaactgccataatgggtgatgagcagagccgccttctcctcttgttgtgcggaggagaagaggctgatgccgagtaaatagagagtgatgaaaaaatgtttcataattgttgttgtttctaaaagcgttatggagaaattattttagtctgagtgccaggctgactactaccgaacgtcccggggaatacaaggcgaagttcttgttcagcgggcggttgtccttcttgttgaagatattgtctatgccgatgcccggttcgatgacaaagttgcggaagccgtcgaaggtatggcgggtattgaggttccagatgccgtagcccggagcattgccgtccgcgtcacccggataatagactttgctttgcagacgaccgttcaagttgaggttcaaggtatagtcgctccagctgtgtgtatagtttccggtgatggtggctgtatggcgtatgctgcgttcgatgttttgccattcgcctccttcgttcagaccgcgtccataggcgtaggtatagtttccggccagggtgaagcccgggaacagattgccgttcaagttcacttcaaagcctttgacggtagctttctcgaaattgaagtagttcttgacacttaggtttttcgtggatgaaaggtcaccgatttcggggaactcttcacgcaactggttctgctctgcttccggtaggtcatcgaatttagtggatttggaagttaccatgttctttacatagttcagatagccggtgacggaagcactgaaacggttggtgcggtattccatgttgatggagtaatagttgctgcgttcggggtcgaggttctcgtcacccaatgagatggtggctcgtgtacccattgtcttcttgaacatgtggtagtagagctcgtcaattcccggagcgcggaatccggcagcataggtggcacgtacattgaagttgcctatgttgtacatggctgccactttgggggtgaagcgtccgcccgtctgttcgtgatggtcgtagcgtacacccacaacaccggtcagatggttccatagcttcacttcatgctggccgtaggctgatgtcgtatagacacttttgtccaaatcggagtcgggacggcggagtacttcacggcgatagtctacaccgaacaccgtagtgctgttggttgtaaaaccgaagatacctttcaactcggcatcatggaatttctgaagcttggtaagcgcatactgtccgggcaggtatccgctgttttctatcaggtatttgtagcgtgatgcgtaattgtttcctgaatagtcgaactggataacgttgcgtttactcagtttgtatttggcgcctgccccccagttgtaaccttcgtaggtagtgttgtacttgcttccgccggtgatatcctcgcgttctaccggacgttcgagtccgcggttatagtatccaccgttggcatagaaggaaagctggtccgtagcatcataggtaaacttctgcgaaaagttattcgagctgtagcccagggagagcggggcaatcgtttcgatgatgtcttctccatcttctgtcagatggctgttttgccaaccgtcggagtggtcgtatttataggaagtgtaggaccctatttttccttgggcgatgtccagattcaagccttgggagaattgattctttctcgtatagctgctattgctgctgaaggctaccacatctttaggctcgttggtaatgatattgattacaccgccgatggcatccgaaccataaagggaagaagcggctccgttcagtacctcgatgcgtttgacgcgggtcatgtctatttggttgaggtcgatgttaccggtaatgtctcccgtgaccttgcgtccgttgaccaatatcagcacgtgcttgttggagagtccgttcatcatcagataggaccccattgcgttcggacggaaggagagcgagggtaccatcatggtcaaggcctgctggaagtcggtgataccggcacgctttatctcgttggcagtgataaccgataccggagacggagtgttcttcagtcgctgatgtgtacccgtacccgttactacaaccgggttcaactcgtgagttttcttggtcatatcgtcgctgtcacctttttctgcttgtgcataggcaccggtggcgatgattcctcccataaggagaactgtgagaagtcttttctttatcatatattgttttattttatataacgctgcaaaggtacataccattatcggagggtgaaatacttaatagttgttatactgcgatggccaaatagctattaataggtactgtattcccttattccggcacatagataatctctccattttcaagctgataggcaactcccactttctttcctcttttaccggaggtctttgggtcttcgctgggagtgtatttcttgatttcctgcccttctttggtaatgatttccatattttcctttccgggattcttcaccatggtgaagtcttctttggaaaacatctccgtcatattgaagcgggagacgagagccaccatcaaggctacggcaaagaccattgctacgtcaaaaagattggctaccgtacccatggggtcggagtccgaatcgctgtgcagtaatctgtttctcttactcttcattgttttcgtatcgttagtccgttattccttttcggccgtttggcggcttatcactttgtacagatattccaagtcgttcatttcgcgggcataccagcgttgtttcacttgcagggtgatgatgccgacagcagcaatgaccagtcctaccactgtagtggcaaaagccacctgcatattgtaggccatggaggagatgtctccttgtgccaaacctaccagtgcgggacccatcgggatgagggtacccatcagtcccaacataggacccagcttgatgaaagtacgcgaacgtcccaactccttctcggcttccacttcataattggcaagcaggtgttcgcagtaggcgtcgtcgtcccggtgtgcggacagtttggacaagctgcggaggagaggggagttacctgccgacgggagttgctgcaccagtccgtctatattctctggggtgatgttctccagtgtttcagcgaattgcttctgtaatttcatccgttgatagaactccccgaagaaacctcccgcaaggagaatggcacgtagaaagaatagcagcagcaggactatgacgggaaccagcagcccgttcgaaatccagaacagtgtgtttgagattgtttccatatatctttttagtttttaattctttaattcgtttcaatagcccgtggcaatgatgctcaatataacaatgaaaatattgacaatgaacaatacttccaagcgcagcggcttgtcaccgatagcatatcgcagcaaacggctaccggcaccgactgcaaggaaagtaacaccggctgctatccatgagagactgccgaaatcaagaccgggaaaagagaaaagcagtagcgccaggacgtagcagattactccgcctatcagtatgccggggtatagcttcagcaagagggtgaccgcttgtttgaaggccgtgttgcgggtacgcatttctgcgaaacagtcgaaacagaaagctatcattacggcagcttccagggtgacacataccgacaagttcaacatctgcgggcgggaagcaaaaaaagatgccaccacggtcttggactgttccgtcatccacggagtcaccagccacgcaaaaaaggcacagcctgcggcaaccgtccacattccccagcggggatagaaccccaccttcaatagaaaattgagggcaatgaatagggctaacagatgaatgacatattccataatactctgtttctatttattctttttccttctcttcaacagtacgaccagtccgatgaaggtgatgacgacaagactgcctgcaatcactccgttcactctgttcttacgtaccgtttgttcggaagccagtttgtgttctttcagtacgacattcttgtcattggttacggatgcttcgtgtacctcctgcatgtttcgggtataggtctgcttctcactattgttcaaccggtcggcaacgaacgattggagcctggtattgtcacaaacgaactctgtgcaggcggcacccttctcgcgtgtgatttgtgcatgcaaggaggcggtggttttcagttgctcatcagatgctttccagtaacctttgcgggcactttccagcatgacggctgtcatggcctggaatgcggcgggattgacacggaggaagtactcgtgaatgcccagcttattctcatcctttatatatattctatataagtcattgaacagttccttgtctatggccgacggacgcataacgtgccagccgaagatgttgcggaagatttcgccgaacatctgcgccgaaccttccccgcctttcatccgctcttgtataaaggtagggttcaagacggtggaacgtgtctctacggcaatggcctctttggcatcctgcatgcggcggttggtccggttgcggtagtctgccatataggcatccggttccttgccggtcacggttttgacggtgagcgagagtccgcccgtaaattcatatacatggtccagagagatggggccccatgtgttactttgacggggctggatgacaacatccgtttcggacagtgccgaggcaaacaaaccttcctggacgtctccccaattttcgtcgtccccataagaggcacccatattgttgagatatccttccgctatttccttttcgctttcccacgaaccgctgtgctcggtataggccatcataccggtactgtatccgctgttgaccggtccgaatacacgcatcacagacatttcacgggcacgtttgggggaagttcccttttctaccagtaatttttcctgcaacaatgtacctgatgccacgtagttggaataggtctcattcccggcttccgatgccagacgtatggcatcggtcagtagtttcaggcgggaaccggcgatgtcgcgcagttgcccggagacttgcaccagcacattgatgcgcggacgtcccagttcttcgctgggcaccagtttcaagtcgaccactctgccttggtcatcgcgtacgggttctactcccaacatccagaatacttgagcgagtgtggctccttccgtattgatgaattcgcctgcccagaaggtatagcttactttccggggatatttgccgtgcttgccgatgtactgttttaaagtcgcttctgccaatcgcttcccatcttcccaagcccttgggttgggagtattctcggcgttgatgctgtacatgttgcgtccggtgggcagaacgttcgggttcagtacggggtcacctcctggagcgggaaatacggtctccccgctgagtgcacgcaccatggcattttgctcgttggcggtggaggccagcaactgttcgcgatagagcagggcggggcgaagctccggtgctacagatgcagtatctttgggtggattctggagtaaggcagtcagtcttttcctggcagcaggcaagtagtggtgggctatataggtaaagtcttgcaactgctttgtggtgattttacctttatcgcggtccttgcgggccgtttcgtatgccagcgggtcggcagcgacggcgagagtggtagtcagcaggtcgcggtcagaataaggctcgttcatggtgtagtacgcacccagtatcttttcgttggctatctcttcggtgaaggcatccagacgttccaactcctcggctgtatagggttcgccggatatggaatccagattgaggtcgcggtgcagccccaggcgcatggcctcttttttgatgttcattcccagagcccggtgtttggcagtcccttcgtccagcactttgtgaatatcttccagcaaggccgaatagcgttggcgcataccgctctccacgtagggcggagtgagatgggtgaccagtacggcatgtgttcggcgtttggcaatgataccctcgcctacgtttccggtggtatagaagtagaagtgggggaggttaccaatcagtacatccgaccagtcggcctgcgactgtgccacattctttccgggagtatattccaggttgccgtgggtgccgaagtgaatcaccgcatctgctttgaaacctttttgcatatacagataaggagccagataactgtggggcggcgccaccggcataccgtgcaccagtttgaactcatcatctcccaatgccgggcggggctgggggaagagcaggatattgccgaattgcaggcaggcaatggcgatactatcttctgttgccagcagattgccgggcgcatctccatatctgtccgtcacttcctgatatttctcgggaaggagtacttcgtgtgcccattgttcgtattgctcggtagacaaccataccgggtgtgctgttttcaaaaactgttcttgcgctcctttggcatacgaacccatgacggcaccgtcacgatgtatccgcttgccgaactcctctacagtggcaggcagtccgccgacgtcgtacccttccgagtgcaggcgtttcaagaagttgtagagtgaaggaatcacttccattccgcttgccagcagagcgtcttttcccggagtcttgaagtagcagatggcaacacgtttttctttgttggacatgtttctcagggacatatatttggtaatatggtccactacagcatctatccgttcattctcggcggtgtacagataatatccctgcttgtttttgttttgggtggcgatgcagaggggcagcatgcctccgtctatctccggcaccactatacgggcagtcagcgtaccgccgctgacgggggtattggggttcagccattcctcgtggggctgaatcagcgggaaaggcatgaataaaggaatgttttcctggtgcagccagttgatgagtgagtcattgcccagccgtcccataggtaggtagactactgcatcgggatggagggtacgtatcatatcggcacgcggttggcctccggcagtgaaagggtagacattgaagcctgcttgtgtcaggcgtgtgatgagggaatctacgtgggcacggtttccttccatcggaaagttgcgtccggaaatcagggcaaggttgcgtccgtcctcatggtagagatttttttctttcagataggcagttacctcttgcggagtactgaagtagcagccgtattcgcggtggtagaacatgttctctagcaatgggatgggaggctcgtaatcttggtgtccccaccggtggggagtggcaatgtggcgcaggtagagtaaggcattccggtagttgtgtttgttgccgttcttgaggtactcccgcaacgtgtgctgttgctcgttggtgatgttatagttgatggagaaagcggagtttcgtaacgtattggtaaagaccggtactccgccggcacccacccgttccacttcggcaacttggctgtcatcgagatacaagcccctgctgtacatcacgatggcgtcatagccggaaaggtccttcacatcttcttttttgatgcagttgacttctatccgggcacagtcattgttcagggcaatgtcggcagcttgtgccagggttgcgttgataataagtatacgtgtaggagccagccagtattgataggccgcaaagctgcagacaatcaatagggctatgctgccgaggaatattccaagtcttttcttattcatacaagtttattctcgttaatagagtttttgtcttttgcaacattttcttcttatataattcacacttaacgccacacccgtgatgcaaacggctgtacctccaagcagcaatacccaaagcacagtcttgcgtagggtggcattggagttcagaccgggcagacgcatgcgatgcagggctgtatagctccagtatttccagcgggaggaagtgtctgtatggcggatgattcccgtttccgggtgaatgtaatagacgctccggtccgggtcgtccaccgtaatcttccacacgggaagctgggggcgtccgcgatacatattgctcatgtcgcgatagtaggtctcgaaatgttcgagccgggagatgcgtatgccggggatatgttgtgaagaatcacgccgggaggcataaatgctttccacgcctttcagaatttcttcttcggagagttgcaacggacgcggcaggctgtcggtggcatcgatgtaatattcgtttttgctgtcttttacgatgtagtagggatgttcgcggaagttgcgccactctatctgcaaagcttggggataggcggctatgatacggcggtagtccagggggtaatcctccggttgtggggcacgggcatggagcgtgcgtgtggcgctgcctttcttcagtgccggtttatgaatccattcgggaatgtctgccaaagacatcatgccgctgaaggtgaaggtcagtacgaagatgccgaaaaatattccgctgacgtagtgccagtgataccacctttttcggtagggagagaatttggagtgacggttgcggtgtgtcttgcgccatacatccacagttacccagatgccggcaataaccatgaggcagcccagagctgtgagccagatgacggttttagtccaaagggcggtgtcctgccgcagccaggtgaagtacacccagtgggggatggctcccagccatgcccagaagcgttcgcttttgttggagaactgcaagacttcgccgttttgcgagccgagatagagttgtgtcccggcatcgtcggcaaagtatattttatagacgggcatttcctttttcagttcagcgaagggaatccattggtccagagagtggagggtgtcgatgcgggtaatgggagaagaacaccacaaagctgctgtccggtgcaggtgctcgctgtccaaagagggtcgtgagatggtggaatcggcaaggaaatgaaacgtgccttttgtggtactaaagctgaactcggggtgtccggcattgaggttcagtatcgtagacctgacctttacgccacggggcaggcgggctgtgacggaggagatgtccggaagtgagtctccggcttgggagagcatttccagcttttgcattttctccttggcgctgacacggggaaagcggtggtacatcatcacgaaggcggagaggaaccacatgagaaataggatacagagcaaagtgcccagtatcctatgaatagagtacatcagtttggtgataacattcattgtcgttcgcgtttttcctgcaaaagtacaagatgattcaagaacactaaatacccactaatgggtatattattcagtgtcttttccggcagcataggccgccttcttcgtcatgatgtccagcatgcggtgcttcagtccgaaacggatatggtcaatgaatatttcttgaatttccggaatttgtcccagtccttccagttgtgcactgacggtgaagccttctttctcgagcatctccttccactctccggcaatgtcgtttttggcatggtctccggcaacaaacatgaaggggatgagggtcacacgtttggctttcccggctttcagttgtgccagcatggtgtcaaaggtaggataaccttcgatggtgcccacatggaaattggccagtccgcctgctttcagcatatagtccatctgactgtagatagcggtactaggggtataggtaccgtgccccacaaggacgaagtgttctttggaaactttcttgccttgtgccggggcgttgtagcggttgcccagaatatctgccaccttctctgcatcttctatagagtagagcaggggagtacctacacgtatttccttgaagaagggcagtgcactttccacatccctgcggagtgattccatttctactccgtcaatgatgttggtgctctgcacgatgaggtgtgtgtaaccttcgctgcgcagtttcagcatggcatccagtggagtcagcttcgtggtgccgcgctctttcaagcggcggataatgatgcgcgacgtataggcttcttggaacttcaactccgggaaggcagcttgtgccttggcgttgatggcatcaatggtgagggcacgggtatcgtcatgcgtagtgccgaagtgcaccatgagcagggcggccttgtcaccgggtttcatacttgcaagcatatcgctgtgctcgtaattgcctcccccgtgcgcatggcaaaggagggaggtgcttagtaaaagtaataaagaaagaatcttgttcatagattatttatcgttttcaatcactctaagcatatcgaaataataaccttcggcaatttctgcgcctttttctactttaccggttgctatgtcatagatgtagatacaaggattggctttttctgtatttacgccgatgtatgccttaccgtctataataacggagcgttgtgcaaatcgtccgccactgtaaggtatttcttgtccgttataactcaagcgttcttgtgttccggtattgatgttgatgatagaataatagtggctgtaactgtcgatggcagtaccggctgcatcattacgtgcatacacgagggctttaccgttacccaggttttggatggtgagcagtttaccgtcggcgttgggatatccctcatagcttgcatcgaagtctgtttcacctttcttgatgcggagcagatggccttgttctatgtcattggcatcagtgaatgcagccaagtagaggttaccgtctgcatcatacatcacgcaactttgcatcagttctccgtaagcgcttcccgccatttctccggcaagggtattgaccttgttactttccactttcatgtccgagggattgataactgctgtcaggaagtttgaggttgcctttccacctctgcctgatttgtctttaccgaagtagaagtaatataatttaccggccttttcgttgtaggtcagaatgccggaagctgtgaatacttttgctccttctggcaaaggaaggtccagtgttccttcggcaaggatacgcatgtcgtcagcattcagcttggtccagataactttgtccgcattaccattggctgccatgataatcagggtatggtcatccagccaggcatgtgtgtagccgcgtactttgaaggtattctgtacaaatgtttgttcttggactattttgatggaattaccggttacctgcaatttagtaaatcggtcgtttgagtttggcacttgataatagtatttccctttgacaatggcttccatggaataagtgttgttttcacttctgaactcaacgccgtcattctttatgtcaatgactcccatatctgccgtaaggctgtttacactttttacaatggtaccgtcaccctggttcataccaccgtgtttgccgatagtcataaaaatatcaaagtgataatcggaaagttccggttgcgggtctggatccggggtggggtctggatcgttgttgtcggaacatgcactgaatgataaggtcatggctacggccataaggataccggataaaagatttagtcgtttcattttaaataaaattagttagttgatgaataatctgaatttggcgaagaatgctcgtccgggcttttgcagtttatagttatcataggccaatttgtcgagtaggttcgagcattccagcgaaatattgtatcgtcctcgtttccatgaataggtgatgtcggcattgcaaatgtgttgtgccgggatgcgtgccttgctttcgcgagagccataggcctcccatgtcaggaaaaaccagtgcacccactgataactgcaactcagccgtaatttgctttcgggcagaaccacattgtggaaaagatagcttgcttctgcacttccgaagagccaggggcggttgggtacccggttgttgtaagttgccgaaggcttcccgtcagtcttgtatctgttctggtcgcgtgcctcttgaaaactgacattggtggcaagctgtaacttgctttgccagtcgtaacgtacttctccttctatgcccttgatatgtacagccggaacattcttatattgcatcataccttctttggtttctacggtggcttggatatagtcgtccacatagcgcaggaaaccgtttgcttcataataaagtgtatggccgggggcaggatgccatgtgccgaagatacccagattgatgttgtcgctgctttcgggtttcaaggctacattggcatatatggtggtaccgtttcccaataattcgcgggcaaggggcagccggacgctgtgctcataggaaattttaatggataaaggttctatggctgtgtagcgtgaaccgataccgtagccccaatactttttggttattgtcccttttacatccttcgacccggtgatgctggataaatccgtttgccggatattcaggtggttgatgtagttctttacaaaaaaggtattgctcattttttcttcgagaagggactgattgtaggagaagcctgtcacatgttttgccagaatatcattggaggcttcaaaatcagtatccgcttcatcatagcggtcattgccgatgcggcttaatagatagtttaggttgagggagtgatggttgttcaaccgatagtccagattggcgcggccaatggtcaggggacgtttgtaatggcgcatcgaacggccccgtcctgtgatttcgttacgtgagcttacgatataatctccgttccagtcatacttacggtaggctgtatctgtggtcaatgaatggtcccaagtgtgcgagagtgcggcattcagctgcatgttcttccaaatgaaattatgcttttgatagcgggctgaaatgttccatgcatcggagcctctttctgccattccatataccttactctgtacagagcctgtctgcaactccttgtctactttggagtaagaggcggaaacaaaaaaagcatctgcccaggacttattggcaaagccgatttccatttgtccgaacagtgaaaaatagtcatcatggaagcgtctacggtcagtcagaatgtatttgcggctgtcttcatcccagacttcgacatctctcatcatataatcgtttttggagtaattgaccccaaaggtaggtttaatgatcagtccggttcgaggctctacaaactgggcattcaagtctgccttgtgggtatggaaggaaccgataccgtaggagacatccagatagttcttcttctcttgcttcgtaatgatattgatggcgcctcccaatgcatctgtacccagactggcaggtactactcctttataaatttcaatccggtcgatgatattgaccggcagatttgccaatgaaacgccgctgccttttgtgtccaatggtattccgtccagaaaataacgtatggaattaccggacattccgttgatggagaggtcgaagtccgagccaactccgccttcctctctcaccttaatgcccgttgtacggttcaccaggtcgttgaggttattcagagagtttactatcggcttgatgtcgagtgcattgacagcaaaggccccttccttcactttctgcgtttgggtctttccgtaaacctcgacagagcttagcgttacggtactttcctgcaatgtaaagttctgttttttatcctgccggatgtcgagggattgtttcacggtttggtagcccaggaaggagacgatgaaggtatgtttacccggagcgacttgcagtgaatacttcccccggtcgtccgtataggtgccggaggtggtgttttccacagcgatggtggcttgggctatcggtgtcccgtgctggtctatgacttttccggataaggtgaccttattttgtgccatactacctgcaggaagcaggcagataaatgtaaatagcagtcctgtgatgaatctcatttcagtcccttataagcgttcgtaacttgccctcaaggaaaaatgaacaaagagaaagattcctttatatggataaagaatgcctcgactcaatgttttgttgctttattccccgaaagcactaaaactatgttgtcttggcaggtcttctgacttatccctctttgaatgccttcccatccgccgggcggacagtggcttgtagaatattcaaagattttggaaggacttacagcagcgggtctgttcaggatttgcacctaattccctttttcatcactcatctccaacagaaccgggagaggtgaaaccaaaactgggacaaagataacaaaaactattaggtttgcgaatactcctgataatttttcttatctttgcccgcgaattggttccggatgcatgtttccatcatctggattaaaagggaatcgggtgtaaatcccggacagtcccgctgctgtgaagctccgtttatatcatgaaaaacacccttgccactgatatgcattgaaatatcgggaaggcttcaggattaggagtcagtcagaagacctgccattcattaaaggctgcctttgctcgtgggttaggaagacagtacgaagatattagttgaacatttaaacaagaaatggaatgcctttgttaaaggtatgtccgcattgtggtgtgactatatatatcctttatatattaaagaaaaagtaaaatgattaagaaagtattgattgccaacagaggtgagattgccttgcgcgtcatgcgttcgtgccgggagatgggactgcttacggttgccgtcttttccgatgccgaccgtacttctcatcatgtggcatatgccgatgaggcttatccgataggaccggccgtggcaaaagagagttatctgaatattgaaaaagtgattgccacggcaaagcgatgcggtgccgatgccatccatccgggttacggctttttgtcggagaactcggagtttgcacgccgttgcaaggaggaagggattatctttatcggtcccgccgccgagacgatggaggcgatgggcgacaagatagctgcccgcaagcgaatgattgcggcaggcgtacccgtggttcccggaacggaacaacctttgcagagtgccgaagaagccgtgcgtatctgcaacgagataggctaccccgtgatgctgaaggcgtctatgggtggcggtggtaaaggtatgcgccttatccataacgagagcgaagtggtggaagcctacaacacggcacgctccgagtccatgtcctcctttggagacgacacggtctatctggagaagttcgtggaagaaccgcatcacatcgagttccagatattgggcgacaaccacggcaacgttatccaccttttcgaccgcgaatgctccgtgcaacgccgcaaccagaaggtggtagaagaaagcccgtcacccttccttacgccggaattgcgccgggaaatgggagagaaggcggttgctgcagcaaaggcagtgaactactccggtgcaggtaccatcgagtttctggtagacaagaaccgccgtttctatttcctcgaaatgaatacgcgcctgcaagtggagcaccccatcacggaagaggtggtaggcgtagacctggtgaaagagcaaatccgtattgccaacgacgaggtgttgcacctcaagcaggaggacctgttccagcgcggtcatgccatagagtgccgcatctgtgccgaagatacggaaaacaacttcatgccgtctcccggtgtcatcaagcaactgacggaaccgaacggaatcggtgtgcgcatagacagctatgtgtacgacggctatgagattcccatctactacgaccccatgataggtaagctcatcgtatgggcaaccacccgccagtatgccatcgagcgtatgcgccgtgtgctctatgagtacaagattacgggcgtaaagaccaaccttgcctatctgaagcgcatcatgcacgtgcccgactttgtgaagggagagtacaacaccctctttatcgagaagaacgcccgcatgctggtacgcaccaataccaccaacgaagagttggagaacattgccatgataggcgcctatatggactatctggttaatctggaggagaacgtttcggcacagctgtccgatggccgccccatcagccgttggagggaattcggcttgcagaagggagtgcttaggatttaaggaatggaaaattgataatggaaatttaataatggaaatacatataggagaccgtatagcagacattaccctggtgggtaaggaagggaataaggttcagcttaccattgacggaaagccctacgaagtggacattgtgatggcagagaacggaagttgctccatcctgcacaacggaaactcgttcaatgcaggccttgtgcgcggcgagggaggaaagagctatgacatcagcatgctccagcgttccttccacgtagacattgtagacacgcaagccaagtatctgcacatgaagaaaggagccgacgagaagcagggcgacaagattctggcgccgatgccgggcaaggtagtgagcatccccgtcaaggtgggcgaccgactggctgccggagacattgccgtggtgctggaagccatgaagatgcagagtaactataaggtaaatgccgactgcatcgtccgcaacatcctcgtgagcgagggcgaaccggtgaatgccaaccaggtattgattgaattggagttgataaaggaggaataatcccgagtcgcattcagtccgtatattataaatcactaaattgtaaatgcaaatatgaacagagaagaaatatatcgccagtttgaggaactggataaacgtgcctcgctgggtgggggcgtagacaagatagagaaacaacacgcctccggccgcatgactgcccgcgaacgtattgacatgctgctggacaaaggctcgttcaatgagctggacaagttcgtgaaccaccgttgcaccaacttcggcatggagaagaaacagattgccggagacggcatggtgtccggttacggaaagatagacggccgccttgtatttgtctatgcctacgacttcacggcgcacggcggttcgctcagcgagacgaatgccgcaaagattgtgaaggtgcagcagcttgccctgaagaacggcgctcccgtcattgccctcaacgattcgggcggcgcgcgcattcaggaaggtgtgaacagcttggcaggctatgcctccatcttctatcagaacaccattgcgtcgggtgtcatcccgcagatatctgccattctggggccgtgtgccggtggggcatgctactctccggcgcttaccgactttatcttcatggtaaaggagcagagccacatgttcatcaccggtccggacgtggtaaagaccgtgacccacgaggaggtggacaaggaggaactgggcggtgcctatacgcatagcagcaagagcggcgttacccacttcatgtgcaatacggaggaggagacactgatgagcatccgcgagctgctgagtttcctgccgtccaacaatatggaggatgctcccttcactccctgctccgacgatatccatcgccgggtagagacgcttcagaccgtcatccccgaagacccgaacatgccctatgacatcaaggatattatagaaccggtgctggacaaccagtatttcttcgaagtgatgcctcactttgccaagaacgtcgttatcggtttcggtcgtctgaacgggcgttcggtaggtatcgtggcaaaccaacctgcctatttggcgggtgtgctcgatattgatgccagcgacaaggcggcacgttttattcgtttctgcgactgcttcaacatcccgctgataaccttcgaagatgttcccggctttttgcccggaacgatgcaggagcacaacggcatcatccgccacggcgccaagattgtctatgcctatgctgaggctaccgtgcccaagataacgctgattacccgcaaggcatacggcggcgcctacatcgtgatgtccagcaagccgacgggtgccgacgtgaacctggcttatccgcaggcggaaatcgccgtgatgggtgccgagggtgcagtgaacatcctctaccgcaagtcctctgccgaagagaagcaggagattatcaaggagtatgaagacaagttctccaacccttaccgcgccgccgagcgtggcctcatagatgaggtcatcatgccgcgcgatacccgctacaagctggtgcaggcattggagatggcgcacaacaagaatcagagcaatccaccgaaaaagcacggcaacatgcctttataatagtagttgttttttatgtgtgaaatgcgtatccccggagaagtgatttctgtggggatatactttttaaatagagaattaagaattaaacagtaaggttgaaaagtaaaaagtaaaaactaaagatagaaactatggaactattaagaaacctctttgagggttatcccaatctttggggcggaggagtggcacactctgtcctgattctgtccctggtcatcaccttcggtatcatgctgggcaagttgaaggtggcaggcatctcgctgggtgtcacctggattttgtttgtgggcattgtcttcggacatttcgacatgaacctcgacgaacatctgctgcacttcctgaaggagttcggcttgatactgtttgtctattccatcggtctgcaagtgggaccgggattcttctccgctttcaaaaagggcggacttacgctgaacatggtagcaatgctttccgtcttcctcagcgtggttatcaccattgtgttgcactttgccaccggaattcccattactacgatggtgggtatcttgtccggagccgtgaccaatacccccggtctgggtgctgcccagcaggcaaacagtgacctcaacggggtggatgctccggaaatcgcactcggatatgccgttgcctatccgctgggtgtggtgggctgcatcttggggctgcttgccttgaagattttcatgcggattaacacccaaaaagaagaggaggatgccgagcacgggctgggtcatctgcaggagctgaccgtgcgtcccatatcggtagagatacgcaatgaggcaatagacggcaagcggatcagagatgtgaaaccattgttgaaccgtgcgtttgtcatctcccgcatccggcacaccggcagtcaggaaacagaactggcgaatgccgatacggtgctgcacatgcaggatgaaattctgttcattgccaacccgaaagatgtggaggccattgttgccttcttcggaagaaaaatttcggtggagtgggaacgggaggacaagaacttgatttcacgccgcatcctcatcaccaagccggaactgaacggcaagtctctgtctcagctcaagatacgtaacaacttcggtgcctgcatcacccgtatcaaccgttcgggcgtggacctggtggcaactccccacttgcagttgcagatgggagaccgtgtgacgattgtaggcagcgagcttgccgtgagtcatgcggagaaggtgctgggtaactcgctgaagcgtctcaaccatccaaacttgattcctatcttcctgggtattgccctgggatgtatcttgggcagtctgccgttcatgttccccggcattccccaacccgtgaaactgggactggccggcggaccgttggtggtttccatcctcatcagccgtttcgggcctcaatataagctgataacctacacgacgatgagtgccaatctgatgatacgcgaaatcggtatcgccttgttcctggcctgcgtggggttgggtgcaggaaagggattcatcgataccattatttacgaaggcggctatgtgtggattggctatggggccatcatcacggtcgttccgttgctggtgacaggattcatggggcgctatttctggaagctgaactactatacgctgataggtgtgctgtccggagctaacaccaatccacctgcattggcctattcctcggacttgacatcctgcgatgcccctgcggtgggatacgccacagtctatccgctggctatgttcctgcgggtgctgacggctcagttgctgatactggcactggcgtagtttcaccatagataatctatggtacataggttgatttgataacaagtaatgtaaagagagctaacaagtaatgttaggctgctttacattacttgttatttttgtttgtagtattcctccgcttgtgccagtgtctccggtttgccgatgtcgaaccagcggaatccttgcagcggatagccttgtatgtgcacctttgtgcaggcggacaagtagaaaggaatgatggagaacttgccgttccactgcccatcgtccatcaggtggaagagggagggggagatgatgtggatacctccgaaggcgagttcccggtacttcgtttcccggtagtcgaagcctgccggtttcacctctccggtggacttgtttatccagccgtgcaggtggtagtcgtcgtcaaaaaggagatagcgggaagtcttgcgctcgctcacaagcagggtagactccgcatcgctctccagatggtggcggtagagacctgcaaggtcaatgtccgtcagaatatccgcgttgtgcaccaggaaaggttcttgtccgtccagaaaggggcgtgcctttttgatgcctcctccggtgtcgagcagcatgccgcgttcgtcgctgatgtgaatctccgtgccgaagttgtcgtgggcacggaggaagtcgataatctgctccccgaagtggtggatattgaccgttatctcgttgaatcctgcttccttcaaccgcagtatcacccgttccagcatgggctttcctgctacgggaacgagggccttgggcatgtggtccgtcaaggggcgcaaccgggtgcccaggccggcggcgaaaatcatggctttcatattggcatattctcacattagcacattaaactttggccttaaacgtctgttcaatattctgttctctatgtatcaggttcacttgcacgccgaacttcttgtgcagatgttccgccaggtgttgtgccgagtacacggagcggtgctgtccgccggtgcagccgaagcagacagacagattggtgaagccgcgttccatgtagcgcttcacggaagcgtcgacaagggcgtaggcatgctccaggaatacggctatctcgccgtcgtcttccaggaagcggataacgggttcgtccagtcccgtgaagggtttgtaacgctcgtacttgccggggttgttcacagcgcggcagtcaaagacgaaacctcctccgttgcccgtggaatcttcggggataccttttttgtaggcaaagctggtgactttcaccacgaggcggcgcttttgcaggtcgtctgtaaactgtttcagttcggtgagctcgcgcagaatccggcagaggtaaggatattcggggtaaggctcctggagcagctggcgcaggttctcgatggcgaaggggacactttgtatgaagtggggcttcttctcgaagtaaccgcggaaaccgtaggcacccagcacctgcatggtgcggaacaatacgaagtggcgaagctgggcatagaaataagcctcgtccacgggctggtacttgcgcagggcgtcgatgtattccttcagcaactctttgcgcaggctgtcgggatagtttgctttggcttgccacaagaaggaggcaacgtcgtagtagaccggacctttgcgtccgccctggaagtcgatgagccacggctcgtcgtcctttatcatgacgttacggctctggaagtcgcggtacatgaaggtggcggagctgctacggagcaacacgtctgccatcttctggaagtcgtcctccagccggtcttcctgaaagtccatccccgtagccttgaggaagcagtatttaaagtagttcaggtcccacagaatgctgcggctgttgaactctgcctgcgggtagcagtaggagaagtccatgccgtcggctccggcaaactgcacggcgggcagcagacggatggtcttgcgcagtaactgtttctcatcctcgccgaatacgctggtcttgcggcctttctcgatggcattgaataggagcgagtcgcccaggtcttcttgcagataatagatatcatcttcggagcggatgaacacttgcggtacgggcagtcctttctggcggaaatgttctgccatgtagaggaaggcgcggttttcctccacagactctccgctgacgccgataagtgtaggacttccgatgaggcggaagtagcggcggttggagccggaggaggggagttcgtcaatctgttccggttcgtgtccggtatgtgcgatgtagagtttcttaagttcttcggttatcatggtggtatgttttattttcgcagctaagataaaacttttgttggagatatgcttatctttgcacgttgaaaatgtgctaatgtgccaatatgccaatgtgtcaatgacctgcggcatggggaagtagcgcaagtatagcgcagccgattagcacattggcacattaaatcattaacacattaattatgcgttccatccctcagtttctcatagccgcccctacatcgggcagtggaaagaccaccgtcagtcgtggactgatggcattgtttgtgaagaaaggtctgaaggtgcagcctttcaaatgcggccccgattatatagataccaagtatcacgaggtggtatgcggccgtccttccatcaatctggatactttcatggcatctcaggagcacgtaagcagtctgtatgcacgctattcggcggatgcggatgttgccgtggtcgaggggatgatggggatgtacgacgggtacgaccgcgaccggggctcgtcggcagaagtggctcggctcttgggtattcctgtggtgctgatggttgatgccaagtcggctgcctattccatggctcctttgttgtcggggttcatcaattttcgtccggatatacgtattgcgggagttatcttcaatcgtgtcggctcgctccgtcactatcggatgttacaggaggtctgtgaagacttgaacgtgacttgtctgggctatctgcccaagcagaaggaactggagcaggagtcgcgccatctggggctggatttcagccgttctaaggagacggaggggctggacatgctggcaggcttgctggaggaacatgtggactgggaactactgctctcgacaaccgggcgtccattgcctacggcggcagtggaggagaagccggtactatcggagccggggaagctacatatctcggtagcgcgcaacgaagagtccttttccttcctctatgcggagcatctggatattctgcgccgtatgggcacggtcacttttttcaatccggagcaggaccgggctattccgcaagagacggatttgctctatctgcccggcggctatcccgagaaccgtctggaggaacttgccggggcaaggcttgccagggagtctatccgcagctatatagaggccggtggcaggacgctggcggaatgcggggggatgatatatctttcgcagtccgttctttctgatggggatacggacgggggaagtgccgggagctgtgtaggcaatattggaaatgagatggtaggagtattgcctttcagcattacgaacgagcgtaaacgcaggaaactgacattgggataccgccagttcaactataacggatggcggcttaaaggacacgaattccattatacgcagtttgccgtgcccgaggctgatggaaaagaaggtggtgcgtgcagtcttcctccctcgatagcgcaggtctacaatgccaaaggagggaaggtaaccactcccgtctttcgctataagaacttgatagccagttatacgcatctgtattggggcgaggtggatgtaatggctttgttcggtgaactctaaaatagcgcattgatattttatgtaatttcgtttgtgttcttgaaatagtggagtatctttgttttcatttaaatatattatgattatgaaactgaatacttatcgcttgtcttctttggaagactctactgatttatcaaatagagtatgaaaagagtctataccaaaactggagacaaaggaacaacgggtattcatggtggcgcgcgtgtgccgaaagatgacatccgtatcgaggcaaacggatgccttgatgaattgaatgccgtgattggtatcgtgcgctccatgctggcagcagaagatggttggcaggagttgctgcatgctgtccagcgggaactgatggtggtgatgagccatgtggccactccctcgggagtggtgaaccctaatccgctttctgccgcagagttcacgctgcgctgtgagcaggagatggatgccatgaccgtcctgctgacggacaacggctacttccttttgcccggtggcactcccatatcagcccaactgcagtttgcccgtaccgtggcccgccgtgccgaacgccgtttgtggacactccatcgccaagatcccgtgaacgaggatatcctgcgctttatcaaccgcctttcggacttgttcttcgtcatggcccgcatggagatgcagcggcaggactggccggaggagaaatggcaggagtttgcctacaaaaggaaaagacagtaagcgcttatcgctaactgccgggaagctgttttcagcagagagttcctgcttgctgtccgagccttaaatcatacagacatgcccgtacttccgcttcactgccgatatgctttcctgcatcgtcggacagcttcacgcattcgcgccattcctggttgacgttcatcttgcattgcgtcagtttcattacaatgttggagggcttgaatccggtatcattcgtcagattggtgccgatgccgaaggagcagcggattttgcccctgcaatgctcctggatgtcgagtgccttgccaaagtcgagcgcattgctgaagacgatggttttagttgtagggtcgatgcccagttcgcggtagcgggcaacgagcttgtcggtgaaatcgaattcatcaccggagtcgcagcgtacaccgtcgaatagtttggcctgcttgcggctcaggttacttaggaaaatgccggaggtataggtatcggacagtgcgatgcccaagtcaccgtcgtacacgttcacccagttttccaaggccatgtagttggcgtgtttgtagccgaactgtgcaccgtggaacatgaaccattcatgcggatgcgtccccataggcttcatgccgtatttcatggcgaagtggcagttggaagtcccggtacagtattcggcggcttccttcagacggtctatgactttgtcctgtacctcgaacgagaagcgtctccgggtgccgaactccgaaaaatacagctggtgtcggttggagagtgtcaccttttcggagagtttgcagagtatgccgtccatgtcggccacgtttcccaaagaacggttctttatttcggatacgatggaaagcagggggacttcgtaaagggtggccttgtacagatagtccgtgatttcaatgttcaggtgccggtcctcgtccagatggatgcttaccttctccggctggaagcggaaggaggagagccactcccaatagaccctcggcaggaaacggcagtggcgggtcatgtattccagttcttcggtagtcagtatggtctgtgccaggctgtccaccgcctcttgcaactccttcagaaatgtgtctgtataggcggtgtcgtctctgtccttgaagctgaaagtgcccatggcatagggaaacaatttgatgtaggcatacgaggtggtgaatttgtaaaggtctgtatcgagtatggtatgaatcatggcagaatattctttgatttacgattttggggatgaagatagtgaaaatttcttatttgaccagtccttatctgttaacgacggcatattcctattaaaccatgttataaataaggctgttatgggcggaaattttggagaattcggagaagtccgtatatttgcaatgtgtttttcatagtattagatttaaggttaacaaaagattggctgtctgggatagatagcctttttttatgccttcacttttccttctccgtagaggtggcgtgtagtgcagagcgccaaagttccatagaccaatacttgtatccacatcgtcagcatctgcggccatacgtcggccagcgttccacccattgaattcagttttacaaaagcaagtacggcaggacctgccggaaacagatagtgggctgcctgccaataccacggcatcagttccagcggataagacacgcccgaaaggaagatatagcccacagagaagaaggctatcatcagcaacggcgcttcggagtctgtaaaccagcgggagacggccagggcaaggaaactcgtgcccagcaggaagggtatcatcattgtgacgatgtctcctccgctgccgatgtgggggatgctgaacagatgcggcagcagtcccagcaggaatagggagaacaccacatacagcatgaagtatacgaaggtcctgcccccgacaatccgccatacatcctttagcgagccggcatgcatcagctgtattccctttctttgggcttccgcttcctcgcccgtcagcatggcaatcaccatcagcatcgtctggaagatgatgacaattaggacggctggaatcagatacgaaccgtacccctccctatagttgtagagcgccgtgccggacacgctgacgggagcggacgaagccactgccagcactccttgcggaggtaggaatacggtgccctccatgcggtgggcatcgttcacggcaagcatgacgcgcgcactggattcttgcagtcctttgaagttgaggaaagtgtccgtggcggcatagagtacgaagaccgaagtctcgccccgtgccacacgtgcctcgaagtcggcaggcaggtaaaggatgcctgccacgtcgccctgcttcatccattggcgggcttcgaggatgttgggtgtctggccgtagacggcggtctggggagtggcgtcgagcagtcggatgtattcgcggctgagggcggagtgggagaggtctaccactgcgacgggagccttgcgcaccaggttgggggcgtacatgtagttgtagagcagtccgtagaggaagataccgcctgccagcacgagcaggatggcgggattggtggcgatggcatgccattcgtggcggatgacggaagctgttgacaatgcggtaggtgtgcaaggtgatggggaggtggggattgcttcttccctcgtttccttttttatccaccatttcagcaacggcagtatcagtagtgctgccagcaagaagatgaagagtgtagctaccgactgccagaagtaggcaaaccctgcatcgaagtaaatcatggcttgtgccgcctccgtgaagtgccgcacggggaagaggtaggaggccgcatgcacgggcgcatacatggctgtaacgggaaacgtgactccggacagcgtagcccccaacgaccccaccatggatactacactgatgatataggcaatcttgggaaagacagaatagataaagaccgccaatgcctgggtagcgatgatgaagagcacggtcattgcattcatcagccacagactgccagcgaaggggatatgtagcgggccgaacagtacatagtttgccaggataccgatggacgagaagatgagggtatagggcagcagtttccctgctacggcagtgaggatattgcctcgtgccgtctccagccattcgccgacgctgccgaatttcagttcgctgcctatggagtagacggtggtgagcaggatgagtatctggaacagtacgaaaaagaaaggctggctcaggtagatggagtagtccatgtccggattgtagaggggatgggtactggcttctacggggagcagaaaggtctgtatctgttctccgcttactcccagtgcttcggcctgcatcacgatgggcgagagcgccacgggggcaagcgtattctcgaacgccgccatcagctcgctgcctaccgaaagaagggcatagtggtaataataggtgagcgttgcgccagttcccgtcaccgccttctgttcgaagcggggcgggatgacgaggtagccgtatatgtccttctgttgcaatgcccggcgggcgtcggcttcgtcggtgaagtgctccgtcacacggaaggtgggggcggcagagatgcgccgggagatattgcgcgaagtggcagtgttgtccaggtcgacgatacccacgggaatgttctccatctgtccgtttccaaagatggtggccatgaagaacagacagagtaagggtagcacgacgcagacgccgaggtatagacggcgggaggtcatgcggtgccattcgcgacggataaccatgcgaagcgctttcattgcgcagccaaattctttatctttcatttttcattcttcatttttaaaagtacggacatccccggtctcaatccctctacctgctgtgtgggacgtgcgtgtatctcgaacgtctgcatgtcatagctgcccgtctgtttggtggatttccaggtggcgaagctgcccagcggactgatgtaatagatgcggaattcaatgtccttgccgtcgatggcggggacatcggcacggaaagtgcctcccatcttgaactgcggcatcaggtcctcgcgtatgttcagtaccacgtgtgcatcgtccatcacgacaaggctcatgatgggagtgccgggggccaccagctctccgcgtttggggaagatggtggctatctggccgtcttcgggagcagtcaggcgggagtcgacgaggagggaggagacttcatcgacggtgcttcgcgccgcttccaccaggctgcgggccgaggcgcggtcctcgctctgcgctccgtctacggccatctggtattgctcgtaggcggcacgttcggcggcttgggcggctttgtacatggcttccacctcgtcacgccgctgggaggtgacgacactgtccttataaagcgttacaatgcgctggtaagtggtcttggcgagggcaaggtcgctctgcgtcttgttccagagttgccgggcggtggccacaatctggcggcgggtaccggcgtctatcttcttgttctgctcctgggccacctgctccagggcattcacctggcggtatttggcttcgatggtggggctgttgatgacgacaagcgtatcgcctgccttcacccagtcgccctcttgtacgaggaaggagtccacacgtccgggtagctttccgctgatacgtatttccgttgcttccacttgtccttgcaggaccaggggctgccggctcatgagtaacatgccggcaagtgaaatgatgaccgttgcagccaggataatgacgaatgcaatgctgatgcttttattattgattttcataaagggtaggttttaataagttgtctcgaaatatttctcgaaccgttccggcgttccgcagatagccagcaggttcatcagtgccacatcatattcgtagtaggctgccagacgcgccacgcggacggttgccagcatcgtttccgcatctacgacctcggtactggttgccatgccttcggcaaaggatttcttgcggattcgcaccagctcttcgctcagctcgatggtggtattcaaggcgcgtacgttgtcttgtgccttttgcagttgggtgtagagcttgtcgatgcctacgctcaggtcttctttggctttttcttgtcccagggcaagggtctgctgggctatcttcgactggcggatgcgcttctcacgcgccagtccgtcgaacaggttccaggtgaagcccacgcctacgatggtgcgggggacgaggttgctctgtatgccgtgggcatagagggtctgcttgccgaatacggcgatgtccggcaggtagccgctctggtcgatgcggagctgctggcgggcaatctgtgactgcagttgcagttggttcacggtgtagttctccacccgcatggcttgcaggaactcctctttggcgggcagttggtcgttgatgaaaagctccgaagtaggatggatgctgcatgtgtcttgcaggttgagcagggtgcgcagggcactttgcacgacggaggcctccttccgggcagcctccagtgaacgggcagcttcatccatattcacttgggcaaagagccggcctgccttgtctatcatgccggcagcttccagtttaagggcattctggtaatggcgttgcagactgttgtaagtctcctgccgcacgcgtactacctcttgcgcaagtttcagcccgaagtagctttctgccagcagggtgcgttgcgtggcatcggtctgtccccggttttcgcgggcaatgtctatcatggtgttgcctatcttcgaggcccggatgcgcttgccgccggagaatacgacccattcggcggtcaggccgacggaagtcaggttgcgtggagccagtggaaaggcaagggtatgggagcctatctggtcgagtatgctgctgatgaattggtcgtccggcacgatgttgtgcacaaagtcctttgccgggtcggtgaactgggaaaggggctgttttacctctatcttttcggaaagatgcacgaacgtaccggcaccttgcaggaaggggtaccagagggcattcagtttgtcacgttccgcacgggcggcttcaattcccttgtcagctattttcaggctgcggttgccgttttgcatctgccttagggcatcaccgaagctaaggggaagggaggtttgtgcagccacttcaccgatggcaagcagcacgcaggcagcaaccggaaaaaatctccggcatgatagattattcataagttcgttcggtttaggggttcttgtttctctaaacaagaggaggtgggaattgttcagtagtcatctttttgaatagaacgttacaaatataacgaatagtttccgaagatatggcttatgaatgggagagatattcggatttgcactatctttgcattcgctaaaatagaatttatggagaaacttcatccgattatgtttgccgggacgggtagtgatgtgggaaagagcatcattgctgccgccttctgccgtatcttcaagcaggacggctatcagcccgcaccgttcaaggcacagaatatggcgctcaattcatttgccactcccgaagggctggagataggccgtgcccaggctgtgcaagcagaagccgccggagtgccttgccacacggacatgaatccgctgctgctgaaaccacagtcggaccatacctcgcaggttgttcttaacgggcgtcctatcggcaaccgcaatgcttatgattatttccgcaaggaaggacgcgacgaactgcgctgggaggtttgtgctgcctacgaccgccttgccgcccgctataatcccgttgtgctggaaggcgcgggaagcatctccgaaatcaatctgcgggataccgaccttgtcaatctgccgatggccctgcatgccggagccgatgtaattcttgtgggcgacattgatcgtggcggtgtgtttgccagcgtctacggttcgctgatgttgcttcgtccccatgagcgggagcgaattaaaggaattcttatcaacaagttccggggggatatacgtctcttcgagtcgggcattacgatgctggaggagctttgcggcattcccgttgtcggggtggtgccttactaccgtgatatctacattgaagaagaagactccgtggcgcttgccgcaaagtctgtccgtgccgagaagggaaaggtgaacatcgccgtcatcctgctgcgccacctcagtaacttcaccgatttcaatgtgctggagcgtgacccgcgcgtacatctgttctataccaacaatgtggatgagctggcaaaggccgacgtcatcctgctgcccggctccaagagcacgcttgatgacctttacgaattgcgccgtaacggtgtggcggctgccatcatccgtgcccaccgtgaaggtgccaccgtgatgggtatctgcggcggctatcagatgatggggcaggaggtgctcgaccctgagcatgtggagggggacatcgaacgcctgcccggactggggctgttgcccatcagtacccgcatgtcgggagagaaggtgacccgtcaggtgaagttcggtctgtgcaatccccattctccatcttccactctccattctccattcatgcagggctatgaaatccatatgggagtgaccacccccgtggaaggtactcccgattctcccctgaatcttttggagaacggctctaccgacggatactacgtggactccacctgcatggggacttatattcatggcattctcgacaatccggaattcatagatttcctgcttgcgccttttgcagacaaactgtccgggaatgccggcgctttcgattaccatacattcaaagaagaacaatacgataggcttgccgagcacgtgcgccgccacgtcaacctgccgcttatctaccaaatattgacaaagaaccatgattgaaggacacggagacgattcctataaatacagccgtcccattacggcaaacttcagctcgaatgtttacagcagggtagacctctctgccttgaaggcgcatctgtgtacccggattgacggcatcggcaactatcccgaaccggagccttacacgcttgaggcctgtcttgcccgccaccaccaccttcctgccgaggcagtgtgcgtgacgaatggagctaccgaagccatctatcttaccgcacagactttccgcgggacaaacaccgccattgtgcagcccactttcagtgaatatgccgatgcctgccgcatgcacggccatcgggtcacttccctctatcggtttcctgcggagagcgaggggtatcgcttgccggaagaggtgcgcatgctgtggctgtgcaatcccaataaccctaccggaacggttgtggagaaggaatatctggcaacacttatcagtcataatccgcaggtatgtttcgtcatcgaccagtcctacgagtttttcaccttgcgtccgcttttctctgctgccgaggcggcggaatttcccaacgttctgctgctgcactccatgaccaagcgttatgccgttcccggtctgcgactgggatatgtcaccggcgctccccacctgctgcatcgcctgcgtaccaaccgtatgccctggtcggtcaaccagcttgccattgaggcggggctccatctgctggaacatgatgttcccaatccgctggatgtggcgtcttacttgcaagaggctgcccgcctgcgcagtgcgctcgaggcattgggaggactggaagtatgggccaccgaaacccatttcatgctggtgtgcctccgtatgggtagggcttccgccttgaaagactatctggcaggggagcatggtatcttgattcgggacgcctccaacttcgacggactgaatgaacacttcttccgtatagccgcccagagccgggaggagaatgacaggcttgtaaaagcaataggacaatggcttgaggaggaataaccgatggaagaagatgtgcttatacttttgggtgtcgccttcaacttgaacctgccgcttctcactgcctggctgctcgaccattggctgggcgacccggcgtggctgccccatccggttgtggctttcggcaaagccatttctttctgtgagcaccggttgaaccagggcgattcgtgtttcctgaaaggtgcgtttgtggcggtgtctcttgtcttgggggtatatgtcattacgcttttgttgctccgcttggcggcactcttttctccgggcatgcttctgacggtgcagatactgctgatattctattgcctagcaggtactacactggttcgcgaggtgcgtatggtgttcaaggcggtggaccgttccttggaggaagggaggatgcaagtggcacgtatcgtagggcgtgatacgtctgcactctcggcgcaggaggtgagaaccgcggcattggagactttggcagagaatttgagtgacggggtagttgcccccttgttctggtatctgctgttgggagttccgggcatgcttgcctataagatggtgaacacgctggattccatggtcggctacaagaacgagcgctatcgtcggttcggctgtttcgccgcccgtctggatgatgttgccaattatattcctgctcgtctgacagcctttctgatggtgctggtttccggtcgtctttccttgtttgcttttgtgggcagatatggcagccagcatgccagtcccaattccggttatccggaagccgcccttgccggtattctggactgccgtttcggaggtccgcacaactatttcggcgaggaggtatggaaaccttatatcggttctaatgaacggcctctgaagacagaagatatgcgtgtggctgtccgcatcaaccggcgtgtggagtggtggatggtggttgccgtaatagtgacatcgaccttggcttccttttgtttttaaaatgttgttattttaactgattctttgtccgttccaaaaagatataatatctttgcaagaccgcgttgcattaaaaaatgtaacttttaaagcagacaaagtcttataaatgaggataaagcaattatatatattccttttctttatttggttcgggagcacaataattgcatcgacaacagataaagcggattcttggactaaagaaaaggaaagtatagtccatgaggtcatctccacttttcacaacagcctcggtttcgactatctgacccgggaggagtgtgactcgctgaatgccgacggccttttgtcccaattggatgaatcccagcgctattacacctatttcgaactggaaaggatacttataaaatcctcccttttccgtggagaaatccgtatggccattgcccagagcgaccagatgtactccaaagcccgcgcgcttgcctaccccttcggcaatgccctggcgctgaatgccatgggagaggtgtacagctataccggcaggcttcgggaagccggtaccgcttacgaagagtctttgagactgctggatgggatggacggggaggatgtgcatatccgtatgctactggtggaactgatagattataacctgcgcatacggaatgtaaacggtgcctcgcgttatcttgcacgtctgaacctttatccggaagaccggctttctccgctggagctggccatgcgccacatctccaatgcttcctgccaattattcaagggtgacttgaaggccgccagccatcatctggcacagataggccagcttgaagcgcaactgattccggagatacagcaataccttctgattatagatgcccgttatctggtggccaccggagagcatgaggcagccttgaccgcctacaatgatttccttcaaaccgaatatgcccggataaaccataacatctacaaggaagctctgctcgaaaaagcggatttactggtgaagatgggaaacaaggaagaagcctacggacagtacggcaaggtcttttcgtatatcaagacttcgtttgagaagaactatcccaaggagatagaccggctctgtacccgtttccaggccgaccaactggcctaccagaacgaacgcgaccgcattgtatccatgcgtttctatctggcaggcatcattgtgtccgtactgtttctgatattcctcctggtgctgggctggaagaagatattccgtttgaagcgttcccagatacggcaggaggcgatgaaggagaaagcggtgcaagccatacaacggaagaatatgtttctttcgaacatgagccatgaggtacgtacgccgctgaatgccattgtcggattctcggcggtactgacggatgaggacgagtcgttcgatgacgaatcgcgccgggaattctccgaaattatcaaggtgaattcctttcagttgctgaaacttatcaatgacattctggatttctcggatttcgagaatgacaatataaccttcaacatccgcacgcatgatgccgtgaagttgtgtaatgaggtcgtggagaccgtgatggcctcgcgcaagctggaggttgaaatgcgttttgacacggatttgtccgtcttgatgctggatacggacgatgcgcgcctccgccaggtcttgataaacctgctggtgaatgccgccaagtttacggaacaaggctccatcgtgctggaactgaagatggctgatgccggtacggcacttttctccgtgacggataccggatgcggcattccaccggagaagcagcacttgatttttgaacgctttgaaaagctgaatgattttgtgcagggaagcggactgggtctttccatctgccaactgattgtgaaatatatgaacggcaagctgtgggtggacagtgggtacacccgtggcgcgcgtttctgttttacgcatcctttgaagtataatcccgcattacacggaggaacggcgcaatgaaacgaatactgattctcatccatgttttgttttgcggatatatctgtccgctgctggcagaagacacgggggctgtccggtatcaggacagcatcctgaaggttgccgatgccctgccggccacccttgtccggctgacgtatctccgtgacatggcctacaagcaccagtatgctccctataacatgactttttccacccgtctgtacgaggaggcgcggcggcagaagaacgctttctatgagaatatgggcgcttactatctggcggcatgttatgacaagaaacacgacccggacagtctgtcgtattgggtggatgtgttgaaggattttgtcccccaggtaggcacttacgattattatctggagcagaaggctgccatcagccgcgccctggcttccaagagacagatagagaaagcggtgtatgtggctaaggagacgttggaggaatcaaaactccgccatagcaataatgggatgatagcggcgtataacagcttgggatgtgcctacggagtgtccagccgcccgaatgaggcactggactctttcttggaggcttaccggaatttctctccccagacaaaggccagcctgaaggtggatatactgtcgcgtattgcccaggtatacggcaatggcggtaaagacagcttgaagctgccctatttgcatgaaatggacatgacgttgcagacggttatttccaaagaacccgagacaaggaagaactggagcaatttcgagattgactgcgaagtgaagtatatcctgcactacatgaaccggaagaactttacagtggcgcatgagcatatcgagaaagtaaaaaaactgcttgagccgcatgtagatcccgtcttctggctgaatgtccagttgatacagcttcaatactatgccaagaccgatgagtatgacaaaagcatcgcattgatagacgaggtgacccctacggtactgaacaactacgtctccacctttgccactttgataaactacaaggcgagtacgcaatatgacaagggggacattgacggggccatcgagacccggcgctacctcatacgcaagcaggattcgctgaacaatgccttctcggccaaccagttgaagcaggtgaaggagatttaccacattgacgagctgttgttggagaagcagaagattcaggacatgaattaccgtataggatttatattcctgggcgtctgcctgctgctgatgctgcttttctacttgtatacgcgctatgtctccggaaagattgctgtcgtagagaagaagacggctgaagccgctttgcaggcagagacggacaacatcgcgaaggaacgtctgaaatcggaaatcagccatgatatacgtactccgctgaatgtggtggtgggctttgccgaattgctgaccggaaaggaggagctggataaggagactaagagggaatacgggcagatgattcagaccaatgcggaaagtctgctgaattatgtcaacagcattctggaattgtcccgcttggagtccggcaagattcagtatgaggacgaggagtgtgacattattcagttgtgcagtgaggtgctggataaagtgaacggccgtgaggagagcactgtgtctgtcagcctgcagaccgacctcaaggaacagcttgcgaggacagaccgaaggtggttcgatacattgcttgtcagcatgctgactccgtcagagaatgacactgcccgttatgaggcgattatccgcatcagacgggaccgcactaggtcggccctctatttcgacgtggtcaacgccccgtttgcaaaggtacattttgagaataaaacgagcttgattcgccatgaaatcaatgcccattttattcattattttggaggtatctacaaggtgcaaaccgaagcggaggaaggccctactatttcgttcactattccttgtcgagattgatgcggacgatgccgccgtagggcgtcaatgcgtcgaaggcttcttcggctttgaggattccggcatagagttgcgcgcagatgagtacgccgccatgtgcgaagatggcaacgcgcgtatagggcttcttctttaattcgtccaaaaactggctgacacgccggtattgcatagtaaaagattctccaccggtagctgccacgttcatgtagtcggcataccattcctgcaagcgtgggtcttcattctgctcgaacggcttcatctcccagtcgccaaaattgatttccataatccgtttgtcccgttctgcatcgggatagccgcaataggtggcgaggcgcacgcagcgggtcagggggctggtgtagacgtggtcgaacggaaggtatgccttcaggttttctgctgtcacggcggcttccgcttcaaacgtaggtttcaggggaacatcggtctgtccgtagcatacgcccggagggacatctaccgaagtgtgtcgaatgagtattacttccatctttaattttcagttgttaatttataattagaataaggcttcccaagtagaaggacagttcgcatagcaggaaagtggccccgcagcagtcacccgtatatccttgtaggcgccgcttcatcaatcggtagagcaggaagaaggtgagtagtgggaagagggtggcaatccacagctttataggcagcagcagtacgaaaggaagcagaccgcaaagaaatccggccagtaactcgtgccagctcatgcggttgtagacggtcttgcttttgctgtcttcctctttccgggcatagggcaggtagttgacaatctgggaggcacagaatttggaccagcagtcaccgctgagcacaaggatgcagagaagtcccagtggcaggtgatgaagttggaacaacagcaggaaatagcatatcaatccgatgacaccgtagcttccgatgtgggagtccttcatgatggctagagtccgttctcgggtggtgccgccaccgaaaccgtcgaaaaagtccgccagcccgtcttcgtgcaggcaaccggtgacaagcaggcgtgcgatgagggcaagaatccatgccagtgacaccggcataatctgtccggcaagccacagcactgccgccatcacgcctcccgtcagccagcctacaaacggccaatagggaaccacatgcttgaaacactctgccggtacttccttgattttccagaagggcagtcgggtgagcattatgaatgcagccaagacattgttcatgttaaaagtatttagtgatggaggcatgtgcaaagttatccatttcattgagcatccgcacggccgagtcgacaatgggatatgcacagatggcccccgttccttctcccaaacgcagccccagattcagcagcggacgggcatgcagggcgtcgagcaccagtttgtggcccgactcgtctccgcagtgtccgaagatggcgtaatccgtcacttccggatagagcctggcggcggcaagcaggcagttggtcatgatgaatccgtcaacaaggataatcatcctcagctcggcagcttgcagcatggcgcctatggccattaccatttccagtccaccaaagtagcggatgatgtcccggggagagccgtcgcctttgtaattctccatagactgtttcagcacttcgtatttgtggcggatgcccgcgctgtcgagtccgctacctgcgccgacacattgttccagaggaataccggtaaagcaggtcatccacaaggaggatgaagaggtgtttccgatacccatttcaccgaagctgaggacattgctgccttcttcatggcattggcgcaccacctcggcaccccgttccaggcacatctccatttcctcttccgtcatggctgcctcgtgcagataactccgggtgcttttacgtactttcatattgatgatgcctttctcgtaggggaggtcgtagtctactcctgcatctactattttcagggtaaagccgtgctgccggcagaggaaattgacacctgcccctccatgaaggaagttgctgatttgctgccaggtgatttcctttggagacagactgacaccttcttctacaatgccgtggtcggcggcgaagataatgttttgcggatgtttcaaggtgggggataatgtctgttgtatgagtccgatttggagtgccagttcttctaaaatgcccaatgagcctttgggtttggtcaggttgttgattttgtcaatcaatgtgggacggattgactcgtccggacgggtgatatgaaatgttttcatcagtctgttgaattttaattgtttgttgttttatgaatgagtgttttttacggtaagtgggatgccggataccatcagtatcacttcgtcggcacgggcggctacatattggttcatccagccttgcatgtccgtgaactttcgttgcagttcgttttcggaagttcctcccatgcctatttcattggtgacgaagataaaggttgcgtcttgtgccgtgaagcgatcgaactccgcctttactgcggcaagtgcccggtcggtatcagactcgaggtcgaagaagaaattggtacaccacagggtgatgcagtctatcaggacaacccgtccctccagccggtggcggctgagttctttctgctcttcgatgtttgtccattccggtccccggcgtttctgatgccggattaccctctggtggaattcttcgtcccaaatgcgtgctgtggcaagataaacgggagtgggagagagctcgagtgccagcttttccgcataggtgcttttgccggaacgtgctcctccggtgatgagtatgattcgtttcattggtatttagtctgtattttgaaagaatatctttgttttcccgagcaaaaataggaaatatttgacgaaacgtttgtttttttaggaaggaatttattaactttgccaccgtttttaaggcatgaccttggaaatgtttatgcggcagtagctcagttggtagagcatcagcttcccaagctgagggtcacgagttcgagtctcgcttgccgctcctccatttagagttaggcagttgcatcacagcggctgcctttttttaaatatcgaggaaaatgttcgggtcaagccattttaaacgtaggaaaaactttaaaaaacgaaatagaatggcagtagaattgaaagaccttaccaaacgtagtgagaactattctcagtggtacaacgagttggtggtaaaagccgatttggcagaacaatcggctgtacgcggctgtatggtgatcaagccctacggatacgctatctgggagaagatgcaacgtcagttggacgatatgttcaaggaaacgggacacgtcaacgcttatttccccttgcttattccgaaatcattcctcagccgtgaagcggaacatgtggaaggctttgccaaagagtgtgccgtcgtgacgcactatcgtttgaagaacgatccgaatggcggcggtgtggtggtggaccctgctgcaaaactggaagaagagctgattatccgccccacttccgaaaccatcatctggaacacctacaagaactggatcaattcataccgcgacctgcctatcttgtgcaaccagtgggcaaacgtgttccgttgggaaatgcgtacccgtctgttcctccgtaccgccgaattcctctggcaggaaggacacacggcacatgccacccgcgaggaagccgaagaagaagcggtaaagatgctgaatgtatatgccgagtttgccgaaaaatacatggcggtgcccgtggtaaagggcgtgaagtctgccaacgagcgttttgcaggtgccctcaacacctacaccatcgaagcgatgatgcaggacggaaaggctttgcagagcggtacttcccacttcctgggacagaacttcgccaaggcgttcgatgtgcagttcgtcaataaggagaacaagctggagtatgtttgggctacctcctggggtgtttccacccgtctgatgggagcgcttatcatgacgcattccgatgacaacggtctggtacttcctccgcacctggctccgatacaagtagtcatcgtacctatctacaagaatgcggagatgctggctaagattgacgagaaagtggcaggcattgttgccaagctgaaatcgatgggcatttccgtgaagtacgacaatgccgacaacaaacgtccgggcttcaagtttgccgactatgaggtgaagggtgttcccgttcgtctggtgatgggtggccgcgacctggagaacaatacaatggaaatcatgcgtcgcgatacactggagaaggagacgcgttcctgcgagggtatcgaagagtacgtgaaggatttgctcgaggacattcaggcaaatgtctacaagaaagcgctcgattaccgtaacagccgcatcaccagcgtggacagctacgaggaattcaaggaaaagattgaagaaggcggcttcattctggctcattgggacgggactaccgaaaccgaagagaaaatcaaggaagagaccaaagcaaccatccgttgtattcctttcgattcatttgttccgggtgacaaggaaccgggcaagtgtatggttaccggcaagccttctgcctgccgcgtgattttcgcacgttcctattaataatacccaccccggattacgcggattaacacagatgattttaggagttctgataatcagaaacttttatctgcgttaatccgcgtaatccggggtgattgtatatcttgatacgtcctctcggttttaaatttatagagttatctctcatcatgaattgatgaacagctatttatattgcttcagaaattctgagattgttttgcgtacagtttccggagattgttttgaatgaagcattgctgcaatgacaatcctattctcatcaatcaaataatatatcacgttaggggaaagttttaaatgacggacagtaatgttgttaaatagagtagaaaaatcactgtctataattcctatatacggatgttttgctaaaagatttactttgtcttgtatcttttgacgtgttttctgtgccgtcaacatgccaaaattattctctacataaataagtatctctaaaaagtgctcataagccaacttagaccagactatttccatcccatgcgttcatttatcatactctctatttgggagtttgatatacagtgtcctgctttattctcttctaaggcaaatagaagggcttcagccaaagcatctcggggaatactgttgataaagtcgtccatcggtatggctgattgatgataagttgccatcatcggttcttgtgccgtttgtttggaagagtcctgttctttatatggtttaattttacccattgcttttatttttaatcaaaggtaaactgaataaatgaaaactcctaatattcaatccatttattttccactgcatcaaagccaaccaacctacatacttttgtaacctccttcacatctgctcgtaacaactttccctcatttttgcagcgtaaaaaaagaaaggaggcccgaatatgaaactgaacagaaatgactataccgtagaggcggcagccggcggtggtttttacgcttatttcatgaataatgtgttgtgcagcgcctacggtgaaacgcctgacgaagcctgcgaaaacctggaacagattgttgacgattttgtcagtgatatgtatatggtcgaggaatttgtctgatgctccggcatcatatgccgaccgaattatcctttttacgtatttattccataaattctcttgaagtcatgtctgcgcgatgccggtgtgacttttgtcatttataaccgaattgtcacattcttcacattctgccgtaacacggaggtgcgatctttgcatcaactaaatgcaacgtcatgtgctgcatgtgtttcaacagtaatttgtaaatcatcaagtcgtcccaatgaaagtcctttttatcgttcaaggagaaggccgcgggcatctgacccaagccattacaatggaagagctgctgcgccgcaacggtcacgaagtagtggaagtgttggtgggcaaaagcaattcgcgctgtctgcccggtttcttcaaccgcagcatccaagctccggtgaaacgttttctcagtcccaatttcctgcctacgcctgccaacaagcgggcaagtcttgcgcgtagtgtggcctataatctcacccgtctgcccgtctatctgaaaagcatgcactatatacaccgccgcatcgaggagagtggcgccgaactggtcatcaacttctacgaactgctcacggggctggcctatctcttcttccgtccttccgtccctcaaataagcgtcgggcaccagtacctgttcctgcaccgcgatttcgagtttcccggtaagaacggcttccatctgtggctgctccgccttttcacccgtctcacgtgcataggtgcccgcgaaaagctcgccctttccttccgcgagatggaggatgacgaagaagcgcatatccgcgtggttccgccattgctgcggagggaggtgctgtcgtgcgaaggtacggaaggggattatctccacggatacatggtaaactccggttttggcgagaatatcctccactggcacagtgcccatccggaaatacccctccacttcttctgggacaagcaggacgaagccgaggtgtgccgtgtggacgacaccttgagtttccatcagctcgatgacgtcaagttcctgcgctacatggcaggctgcaaggcctatgccaccactgccggcttcgagtcggtctgcgaggcgatgtatctgggcaagcctttgctgatggttccggcgcatatcgagcaggactgtaacgcctacgatgcattccgtagcggtgccggtgtcatctccgaggagtttgatttggaacgtctgctggacttctcggagcatttccacccgaacatggctttccgctattgggtgcgtagctgcgactggcgtatcctgcgctgtatagagagggaagagaaagaggaaacctttttcggggtttcctcttcctgccgtcctttctttccggcgacttaaatgttcacgttcatcgcattggctcccaatgcccctaagatggcagaggctactgcaattacgactttcagaattttatcccagatactttttttcatgctatatacgttttaaaagttgaacatacgaatcggtagtaaaatcagtcatacttatcccaacggattttcgccctggtctccgtccgaaccgcctccgtctcccgagccggaaccgccgccggagcttcctccttcaccgtctcccttgttcagcaaagcttccaggtcgtagaagtcaatcttctgcccggcacgcgtggcggcgatgtccggtcttacggtactggaaggccggaaattgattttcaccgccttgatgttcttggcggtgcactcctttacatccagtacgcctgccgtacgcgccgacaggctgaatacgccgaagttcttgatattgaccgactggccgctgtagagggtcgtaatcatggcctccacaaaattggtcaatacactctggatgtctcccagtgttagcgaactcttctctttcatcacatacgcaatgtcgtccagcgtcgcattgtcgcccagtgtcaccagctgcgggtagaactttgccaccgcatctgcctttcgaggatctttcctcgcaatcttcttgaatggtactcccataaacaattaaatgattaaaaattaacaattagaaattaaagtcccgtattgcaatactcttctctttctcctttaggggggggaagaggggtgctgcaaaagtactcctctggctttttctgctcatggctttcttcgggttacgccgtctcttttccgtttcctttctgttcaggaaaagttcttcgtccgatgcccgtttatgtctgtatatgcttggtcatatcgctgatattcagtatctttatggtgtaataatcaaccaataacataaagaatgaaaacagaaaaagaaaagagggaagaggaggaggaagaccttcgtccgttccgcatccacgcctattcgaaggaggagcttgccatgctctacaacccgacttactgcatcagcaatgccatctataccctggcggcatggatacgccacaacaaggcgctgaagggtgagctggagaaggtgggctacaacaaataccggcgcaccttcactccgctggaagtgaaagtgctggtgaagtatctgggagaaccctgacaggatgtcggccggaaatagggaagccttgtaaggaaaacgccaatatatgtaaagccccgtaacaatatatgttgtcatgcacaacaatatatgttacggggcttctctcttctccttgaatgccggttactgatatagctggatgtccactacctcatattcggtcgtctcctgctcgttggtccgtgtgccgaatccgtatttttccagtgcctgcaccagtaccagctgggtgtgcgggttcacctgcaccttcccgaatatgctgagcttggtcagtatgacgctggcagggagccattttatctgcaggtcctcgggcagcggtttgcggaagaagacgaagaggttctcctccacggggtctttcatgcggtgccgttcgttgtgcttgttcagctgttctatctcctcgccctcgtaccagtatctgaaaccgtctttcagcaaggcgagcgcctgggcgtagatgccgggatggttcaccggggtgtggtagtctatgccggtgacggtgatggggaggaaacgccggtttccaccgatgtcctgcaggcactgccggttgttggtgctcgcgatgaaggagcagtggcggggcagggtgaaggcttcgatgtcgtaggccttgcgctgcgtcacgttgtcctgcgcgatgattcgcttcaatgctgccagctcgccgggcttcacgccttcgaactcctccatgttgatgatgattcgcgtggcgagcaggcgggcatcgtccttgttgctcgggtctattatgccgttgtagaagtactctttccactcgggcggcagcaggcgccgaatccagctgctctttccctttccctgctcgctgtagaggatgatgacgagctggttcatgtcctcgtcgctcagtgcgcaggccaccaggcccactatccaccgtttgaagcccttctgccatagctcccggttctcggtcgtcagggtgtcggccagccgggcgatgtagtccgtcccgtcccaggggggaagcgcgtacagatagtcggtgtagggattgaactccttggcgtagttggagtctatcacggctctgaggaaattctggtagcaggagatgccggccatctgcaggtctacgaatatggtgttgtagtcctttccgcgcatggggcggtaaccttttccggcatctgccgacagggcatagggcatgaattcgaggcggtccaggatgaggttcctgcggatgccgtagtgctcttccagaaagctcatcacttggttgatgatgggctttttctcttccttctttgtggcggcttcgctggttttgtcggtatagatgtaggcattgtgcaggggagattccacgtcgggatactcttgcccgaactcgtttttcgccagtctgatggctgtctgctcgtccaggcccttgctgtagcatttgttgcccagggcgaagaggaagttgtcgcggttgcctgcccggaacttggtggtgcgcttcacggcggtcacggcttgggagaatatcagcttctcccaaggctttgcgtcctgcggtgtggcggcagaggaggcggggagggggtgtaccgtttcgacgggcgtcttctttgggctgttctccttcttcgcaggcgggatgatgcgtgccggcaacggggaaatctgttccagcagtgcggcattgatataggcatgcgggtcgaaggacatgaagtatcctcgcgagatgtcctttccgcttccgtccacctctactccgagaagggcctcgtagtgctctttggcggcgctgtacagcttcaggtgtatctcctcgagcgtggcgtaggtcacctcgccctgtcggagacggtcatacagacgccgggtgtattccgtctgcatgaagacgaacagcttgtagccgtgccttttgggggagaggaaactccccagggtgtgcgggtcttcgttgatgagggtccgggtccgctccaactgtccctcttccaggtcgtcgatgtcgagcgtgatgacggggttgtagcgggtgatgctcggtacgagccttctttcccggtagttggccgtgagggtcctgaagggaagctgcttcttgacgtggttggcttcctccacctttccctgcgctacgaggctggcgattttgatgattaacttggcatgcttgccgttttttatgtcagccatgtcctgcgtgaaggttgtctccccgctgacggcgctgaaaccacggtaggtggtcactggaatgttttccattcgatttgtattaagtttgccttattggcggcgcaaagatgccgtttatttccttaggaagcaaaaacggccatccgcagtgggacagccgtttttttacaatttgaattcctcggtccgttttactccttgggatatagctcattgaagagcttatatatctcatcctcaatgcaatcggggttcagcgtattgccgcttccgtccgcgtccataaagtttacaagtagatgcagcagcttggcgaaggggcttacgcccttcagtccgtgttccttttggggatttatcagcagtgggatgaagggtgtcaggaaagccttccgctccttgtattccacggttaacgacttgtgttctaccatagaaagcaggtcgatggccacttgcacctctttgctctctttggtgtacagcacttggtaatctctccctttgatttgcatcacgctaattggcgtttttttgttctcataactacaatttgaaaatataattttatattaagttagtaaatcggttgcaaaattaacaaaaaaggagtctgtacaattacagataacgcagattttatgtttttcttacctgatgcaacgcttctaaggacgtgaaattaaataattcgtgtcatctgtgttatcagcgtctgaaaaattatcataaagcatcatctgctgaatagttacgaaattctgtggtatccctgtgaagtagtgaagcgtgtgtgtagtctgtatgtatagggtgaggtaccggaacctatggttatatatgtaacacactctttctttaaaaaaataagaaatgacgcgcgtgcgcgtgtatcttacctaatgaacgtaattatttgatatatagtgcgatgatacctgcattaaaaaagattatcattttatcaatcagaatattttgtactttcatttcttgacattacctttgcgttcattaaacggagcgtgtcataaaacattttttttattataaacgtttcgtttataacagcttatcgcaagatagcttgaatataactatttcgtcgccttccttccgagatggtggagggtcttgaaataaaatgaatgcacatagtctatttaaagtaaccgcattacattacttgaccgggaggtacttcgctactccggtgtcccccaatcatatttttttgtgaacgagaatgcagaaatgcactggtatgcagtgcgtgtcacctatagccgagagctttttttcaaggaatacctggatgcagagggcattgaaaactatatacccatgcgctatgagtatgtcgtgaggaaagagcgccgcttgcgcaagcttgttcctgcggtccataacctggtcttcgtccgctccacccgtgagcgtatggacgaaataaagaacaaaccgggcatgaatatccctatccgctatatcatggaccgcgaaacccgccagcccatcgtcatcccggactcgcagatgcgcagcttcatcgccgtgtctggcacctacgaccaggctgtgctctatcttgaacccaccgagctgaacctctcccaaggaacccgggtacgcatcaccggcggcatcttcgaaggagtggaaggggtgtttgtgcgtgtgcgccatgataggagggtggtggtgaacatcgagggggtgatggcggtggcgacgacgtttgtgcatgcgtcgctggtggaggagataggagaaggaagttagcgcttattgtattataatgagaattaaatatgttttttggggatattcagattacatgaaagttgtaaataatgatatcctatataataaagatgttttgtattttgctcccaatgatttatcagtcaggcaaaaaatattatataatattctattttttatgacaagatatggatgggagaatatggttcctgagtttatatatagatatttatatcctttacaaaccatacatggatatgaacaagtgtattttattatatacgaacagaatgtttgttctactcaccttccttttttggaatatttgaaaaaaaaatatccgcattcaaaattgttctacatgtttacaaatacattgtcttcccgagtcaatgagaaacagttgcggtttgtggaaaataatcgggaaaagtttgacatgattataacttttaatgaaatagatgcagttgaacataattttcaattttacaatcaggtttgttccgtattgaatgtttcgattaaggaggaaaatgaatcggatatctttttttgtggtttggataaaggtcgaagggcgataatagaacaacttcggaatcggctggaaagttgtgggataaaatgtgattttaatattgttgattctaagcataagttgccatacgaagttattgtatctaaaattgtccagacaaagtgtattttggaaattttgatggatacatcacagtccgggtcatctttaagagcagcagaagcaattgcttacaagaaaaagttgctgacaaataatgctttcataaaagcaaaggaatatttcaatgacaagcagttttcctatttttctactcttgaggatatagatgtggattttataaaggaagctctagacaaatcacaatgtgttgattctatgattgtttcccctaaaagatttttagattttttgaagcagaatagtatttgagagactagaaaatgagagagttcctaaagtcttttttttcatttggtgttgcaacgagcattgagaaaatattggctttcattttgctgcccatttatactcgtttatttacaactaccgaatatggaatgattgatttatgtcaggtacttatggggatagtatctgtatttgcgttgctgcaattggaaacatcgcttcaacgatactattacaaatgggagggggatgataaaaaaatctttttgttcagcatattaattacggtcatttcattatcgttttttttctcaattataatatgcttgttgtcatattatatttccagtttgcttttttccagctctgcttattatttattagttatattgtctgcaatccagttgccttttataaacttttcaatgcttggcttgattatacttcggtatgaaaaaaagaacttactttttacttaccaagtaatattgaaagtcgtattgctattgttatccgtattcgtttttgttgttttcatggatggaggtttggaatgggttttgatatgtcagttattgacactcgtattgacttctatcgtattgtatactaatataaagcaatatttgcttttttctttctcatggaaaaatctcatgatgagctttagttatgctttgcctcagtttcctgctcgtgtgggaagtgtgatgatggtttattccaatcggctctttatggtgttttttttaacaacatcaataataggcttgtattctttttctttaaagttggcctctggcgtgcaaatcttgggaacagcttttatgatggcttggcttccttttatgtatcaacagtttgcaaaggaaaaccaccggttactttttgcgaagttcatgcctttagtttcttgtttcttgtttttattagtatcggtattgtcattgttatctgaagatattgttagtatagttgcaggtccgaattttttttattcatataaatatattggcagtttgtcgctatattttgctttgacaataataaaagaagtaattgatatcggacctaaatatacggagaaaacaaagtatgtatcttataattattttgtgtctttgattgttaatgtggtaagtatgtacctgtttattgtattttggggaatagaaggagtgatttattcgatgatattaacatatctgatgttggttgtaattagttggattgtgtctaataaactgtattatattccttttagtaaattttattttgtaatattgatattgcctgcattgagcatttctatgtctgtaatgaattgcaatatgactcctatgactcgatatatcatattaatattggcagttgctttttatggaatagaaatgtacatgaattataaaaaggtaaaactgtatctgagttagaatgccgtatataccaattttactgttattgttttttttgtctttttcttatgactttttaggtcataagaaaggttataatttaggatattatttcatttacttgctgttggtagtagtttctgggtttagatatcgaataggagcggatacttttgcttatcaggatttttttgaagaggagcaggtttatttgtccgacctatccttagctgattatttttcatatagatgggagcctttatttatttttttcgtggctttaataaaatcaactataaacgattttattttttttcagatagttcattcaattataataaattcggttgttttttggttcatctcttctaatacgaaaaataagtttacagcagtttttctttatttcctatttttgtatgttttggtaaatatggaaatagcgagagaagcattggccgtttctgtctttttggtcagtgtgaaattcttgcagaataaaaaatacgttgcttattatttattggcaattatagcattccttttccactatggtgctgcgatatcgtttgtttttcctttaatatacggtataaggattacgctaagacgcattttctggctgtttgtagttgttgcaggaatcattataaatatagactttatcattgctgcggctttttctttaggagtccctccaattatatttataaagttggttaattatacggaagtatcagaaaatctgaattttatgggtgtcctgatcgcttttttaggttacattctttttccttgtgtattgatgcagatagaaaaccggatattacgtatgagatctcggttttatgatttctatcccatatttcttttgcttggcatattggtgatttgctttcctttcatcagccgtttttttaattatttatgcctcattggtattattttcttaagcgatttcgtagttgagctatggaaaagcaatcgctttgtatttggcactagatatatattactgacatgtatactttcgatggttcttttgtggaatggcagatactactttagtgatatgtcagatttgactggcaagaatatgaggaagtatgtacactggtatccatatagttcaatattggataaaacgaaaaatccggatagggaatctcttcaggattattattcaatgataaatgctgattagcaaattattatttttttgtcaccgctaatttacgacatgtttttttgttgttttttgaattcctaaaatgtgatgaaaatctttttttatattaatactatatccagtggtggtgctgagagggtacttaccaatttggctacagaaatgtccgttcgtggtcataagtgtactatagtaacgtcttttccttgttcatgggaatattcttatggaaagggtgtaaggcgcatttcattaaactcgaataaaatagaaggatatcttaaaagaaatgtattacttacttgccgtttaaggaaattgttggtattggaaaagccggatatacttgtttcattcatggcagaaccgaattttcgggcaacaatagcgaaaatgggaactggtgttaaatctattttttcagtgcgtagtagcccacatattgaatataggggtaaattagcattttttctagcaaaaacgctttttcgttttgggaattcggctgtttttcaaactaatgatgctaaaaattggtttcctcaagcaatacgaaaaaaatcagttatcatatataatcctattggtgaaattttttataatacgagactgaatgaagtccggtctggaatagttacagttggtagaattaataaactgaagaatcataaattattgattgaagcatttgcaaaaattgcaaataagataaacgatgaccttacaatatatggttctggtgatacagcttcgttaaaaatatatgcagagttacttggagtaggtcaaagagttcactttccaggacaaatatccaatgttcctttttctcttagaaatgcgcgcttatttgtcttgtcttcggatattgagggaatgcctaatgcgctgatggaagctatggctattggtcttccttgcatttctacggattgcccttgtggtggtccacgaatgttgtttcctaagagtattgctgcttatcttgttcctgtaggtgattcagaaactttatcggaacgaatattgacagttcttactgatagggagctggaaatttttcttgcgcaagaatgtaagaaagcttcttttgaatttgaaccatgtagggtttttgatagatgggaatggttatttgaaaacgttgtgcggtcatagataatatagggaatacggtgaaaatattgcatgttataaattcattggtaagagggggaggtgcagaagcattagttctggcattagcaacggcattgaataagattgaaggtaatgtagtgcatgtgctcagcttggaaaatccaaaggataaagaatatgcccaattactggaagcacaaggagtccgatgttttgtactatcacatcaaatgaggtcgtttaggaatattcaattgttatcggattttattcaggaacatgattatgatattataaatgtccatctttttccttccttgtatgtggtggcattaacccaaagactaaaaaaaatgaatgtgcgtttagtatatacagaacattcaacaactaataggcgcagaaaaaaaatatggagggctgttgagaaaaagatatatgatacatatgattgtgttgtttcaatatctacagaggtggagcgggcattgaaagagcatattcacaatatacatagtgttgtaatcaataatggaattaatgtatctttttttgaaaaagctgttccaatagatatatgtaaagaaataggggtaacttctgactgcaaatttgtagcgatggtggctcgattctcttacatgaaagattataaaactcttattagggcattattaagactagataataatgtgcatttattatgtattggtgatggtccttttctaaatgataataaagattatgctcacgcgatgggtattggttctcgtgtacacttcttgggattaaggaaagatgttcctaatttattgcaaggttccgatgttattgttctttcgtcagagcacgaaggattcagtatttctatgcttgaagccatgtcatgcaagaagccatttattgggtctaacgtgccgggtattggtgatttagtaagagatgtggcattactgtttgaattccaggatgatgaaggattagctttgtgtataaataaggttttaggggataagacattgtatcaaaatgtagctgaaagatgtcattcttttgctaaacaatatgatataaatgctgttgcacagaaatatatgtgcctttataaaagtttgtgattttttcggagaactctcttttttcatttacgaattagtacaatgaagttttacttattaatattacttttctttattttacctatatatagtcaagctaatatcgttttcgtgacaaatagtatacagcctattcagaatcagtttaatttatcatatgcgaaatatgtaattaaatccaatataaatcttatgtctcaaaacgttgtcattcctgaaggtgcagtcttgtgttttgtagatagtggacgaatcgaaaatggtacgcttattggcaatggaacaaaagtaatggctcaacaaaatgttgttttttcggataatattttgttaaaaggaagttggaaagctgatacagcctattctatatggtttgacttcaaaagtgattgtgttgtcgattcttcaggacgatttatcagtggaagtgataatagccagcagatgaataacatattgttgtttgataatttactctttaactgtggtgtttactactttaaacatgctaattttcagttacattctgatatgattattgatgggggaaatagtgtttttaaatggaatacatcgttgaaggcagattgctttatggctattggagataatagagggaaatgggctggaacatcaaatattcagttgaagaattttacaataattggcaataaatcggagtcagatataaaaacggagcaatgtcatggaatatgcatccgatatggaagtaatatcatattgtctaatctgcaatccggttttaatcgtggcgacggattatatataggcaatgtttaccttgagtctaatatagatcactcaccttcttatataagtgttataaattgtatttttagtgacaatcatcgtcagggaagttccattactagagctaatcacgttgattttttaggatgtaaatttataaatacaaatggtacgccacctcaagccggtttagatattgaacctaatgatataaatatttcagcgtatgaaaactgttattacgcgtgtgaaaatataaggataaacaattgctttttcagcaataatgcaggaaatggtttattggttgctggaagaagtaaaaatagagaagggaaatatattgttaataatatatttgttaataatagtgtgttcgacagagggaatattcgagcttttggactgaaaaatatgcaggtgaaagattgtgatatattgactgacagctatggatggcttacatatagatactctacagaagatgttttaatcgataaatgtaagattatatgttgtaataagaacaatgattttgtggggataaaagtggaatctacttctgagaataaacataataatatcataatttctaattgctcaataacaaatttcggcaaatttggaatattcttcaatgataaaattgatggtatttcagggcgtatagtgaataatatctttcataagtgtggtaaaaatatgaaaaagaacgatttgagtaaaaagattgaatataaggagaatatatataatgattagatgataattataacttaaagtttatataatgaaagtattagttaccggaggagccggctttatcggctctaacctttgcgagtatttacttgcccataattatgaagttgtatgtttggacaacttcgcaacagggaagattgagaatcttcttccgttattgaatcaatatcctgatacatttaaactgatcgtaggtgacatccgtaatttctctgattgccagaaggcagtggtaggagtcaattatattctgcatgaggcagcattgggttctgtaccccgttccatcaaagaccctgccactactaatgcagttaatattagtggcttcctgaatatgttgattgctgcccgtgatgcaggagtgaaacgctttatgtatgcggcaagttcatccacttatggagatagccagtctcttcccaaagtggaagatgtgatcggcagaccgttatctccttatgctgtaaccaaatatgtgaacgagctttatgcggatgtatttgcacgtacttatggaatggaatgtatcggcttacgctattttaacgtattcggacgtcgtcaggacccctttggtgcttatgctgctgttatccccttatttgtaaagaaattgatggcacacgagagtcccgtgattaacggtgatggtgaatacagccgtgattttacttacattgacaatgtaatccagatgaatatgcttgccatgacaaccactaatccggatgcagtcaatcaggtttataataccgcttttggagaaaggactacattgaatcagctggtgaattatttgaaggaatatttgagtgagtttgatccgaaaatagctgatgtggagattcttcatggcccgaatcggcagggtgatatacctcattctttggcttgcattgataaggctagaaaacttcttggttatattccggaatacagcatgcgcgacggtctgaaagaagctgtcaaatggtattggcataatatctgattcattcattctttttccctttctattagctaataaactaaacttcctaataaatactgaaaatcttatggatacagtaaaaatcgccgtaatcggtctcggttacgtagggcttcctttggctcgtttgttctctaccaaatacaaaactgttggttttgacatgaataaatctcgtgtggatgcattgatggcaggacacgatgctacccttgaagtttcggacgaattgctacagtctgccattgccaatggcttcaagtgcacggctgacattgaagacattcgtgattgcaacttttatattgtggcagttcctacccctgtggatcataaccataatccggacttgactcctctgtatagtgcaagtaccactgtagggaaagtgatttccaaaggtgatattgtagtgtatgaatctacagtatatccgggtgtgactgaggatgaatgtattccggtagtggaaaaaatatccggtttgaaattcaatacggatttctttgcaggttattcccccgaacgcatcaatccgggtgacaagctacacacagtcgagaagataaagaaagtgacttcaggttcaactcctgaaattggtaagaaagtgaacgaagtgtatgcttctgttatatctgccgggacacatttggctcccacgatgaaggtggcggaggcagccaaagtcattgagaattcgcaacgtgatatcaatatagcctttgtcaatgagctttccaagatattcacgcgtatggggattgatactcaggatgtgttggaggctgcaagtaccaaatggaattttcttcctttcaagccggggctggttggaggacactgcattggcgtagatccttattatctggcccagtgtgcacagagttatggctataatcctgaaatcatattggccggtcgtcgtatgaatgatggtatgggagagtatgtggctggtcaagtgataaaactgatgctgaaaaaaggaattcaggttttgaactctaatatactgatactcggttttactttcaaggagaattgtccggatgtacgtaatacgaaagtgatagatatttatgaggctttgatgggatacaatttgaatataaccgtttatgatccgtgggcaaatccggatatcgtaaagcatgaatatggaattgaagtgatcaatgaacttcctgaagaaaagtttgattcggttgtgttggcggttgcccatcaactgtttacgggaatagatatcgaaagtttgtcgaagacacggtctgttgtgtttgatgttaaaggtttcttgcccaaagaatccgttgacggcagattatgataaaatgaaaaagcttttctttgttaccaatgttgattggttctttatttcccatcgtttgcctattgccctgaatgctattcagcagggatatgaagtttatttattgtcacgggataccggaagaaaacagtttttacaagggaaagggattcgctttatcgatattccttttgaccgttccggaagtaatcctttgcatgaattgaaatgtatttttcagttatatacaaactacaaaaagtatagacctaatataattcatcatgttactttaaaggctgcattgttaggttctgttgcagctaagctgtcagggcaacatcatgttgtgaatgcaataagtggattggggtataactttacgaacggcaggaatgggattttgcagaagttgataaggactttgattcgcattgcattcaaaagtaagtctttttcctttattcttcagaatccggatgatgtggggatgatcaaaggcttcaatctggttccctcgtcccatatttttctgataaagggctcgggagtagatttgaatgaatttgttttttcccaagctcctggcaagactcaattaaaggtactctttcctgcaaggatattgttggataagggggtgatggagttcattgatgcagccaaattacttcaaaagcgatttattggaaaagtaaaattcatattggcaggtgattgcgacaaagaaaatctggctgttttgggggaagaaaagctaaggtctcttcttgtcgatgattatattgaatggataggatatcaggctcaaatgtttcctatatatacggatagcgatatcgttgtactgccttcctatcgggaaggtttgcccaaatccttgattgaagcatgtgcggtagggcgtcctattgtaacaaccgatgtaccgggttgccgtgaatgcgtgaaatccggatataatggttatttggttcctgccaaggacagtagggcgttggctgatgccatcggcctattgatagaagatgatgcgaagaggaaggagtttggaaggaactctcgtctgttggcggaagaagaattttctatagataaggttgtcaggcaaacttttgatatttatcaatcaattattaggatatcttgatattcccgggtatctttgtagaaagattggattcatgaagaagaacaagccatataaggaacaagaaccgatggtgccgaatgttggtgaaccggtagttgtatatacgggtaatgagaataatccgaatatcgttacggaaggacgtgatgacattaggcatgctatttccggtgaagaattattggatagactttgccctcgtataaaggctttgtttggatgagagtcgtattcgctcccgaagtagaggaggatttgtatgggcttataaaaatacttgttgagaaggagtatttgggtacttatccttttgctatttcttatgtggaagaactgatagctgatattcaacagaacattcattctaaattaaaaaagaaagcgcccgctttttttgagcgttatggtaaggatatgtattacatcacttatcaacgtaattctaatacgacgtggtatattttcttctctgtcattggagatacttattttattaaatacataaccaataatcacgtttccggtcagtatattttttagcatatttcaatgaacatactcgtcactggaatccacggctttgtgggttccaatctcgttgttgccctaaaggaacgtcatagcctttacgggctggatattgtcgctcctgaaaaggagggggtggtaaagacttttttctggaaggatatcgaaccggcttcttttccgatgcggaatcttcctgaattcgatgccattattcatctggctggtaaagcccatgatacgaaaaaccggtccgcagcccaatcctattttgatattaatacgggattgacccaaaagatatttgatttctttctggaatcgtctgcgaagaagttcatattcttcagttctgtgaaagccgctgcagacagtgtggtgggtgatatgctgactgaagatgtggtgcctgctccgataggaccgtatggggagagcaagataactgccgagaattatattcttggcaagttgaatgttgaaaatggagaattgaaagttaatccgtatgatgacaagcaggtctatatcctgcgtccctgcatgattcatggttccggcaacaaaggcaatctgaatcttctttataatgtggtgaggaaaggcattccctggcctttgggggcttttgagaacaggaggtcttttacttcgatagacaatctttgctacgtggtggaagggctgttgactaaggaggtggggagtggtatctaccacatgggagatgacgaggccttgtccacgaatgagctgatagctttgatgtgtcgggctttggagcgtaagccgcatatctggaagataaacagaggactgatggaattctgtgcccggcttgggactctgctccatttgcctttgaatacagagcgtctgcgcaagttgacagagaattatgtggtgagtaatgcgaagataaaggctgccctgggaattgacagaatgccggtgagggcagaggaggggatagtgagaacgataaaatcgttctcaaattaaaagttaagaattaaaaattgataattaaaaattaaagaggaaaatactgttatgtattatctgttaatattggttctgctgtttttggcagaacttttttattttagagtggctgataggtacaatatcatcgacaagcccaatgagcggagttcccatacgaaagtgactttacgcggtggtgggattattttctatttcggagcgttggcctatttcctgacgagtggctttgaatatccctggttcctgcttgccttgacactggtgacgttcatcagcttcgtggacgatataaaatccaccggacagatgacaagactgctttttcatttctctgctatggctatgatgttttatcagtggggactgttctccttgtcttggtggtggatagtcatagccttgatagtctgtacgggcatcatcaatgcctacaactttatggatggcattaacggcataaccggtggttattctctggttattcttgctgcgttggcctatatcaataaggaggtggttacttttgtggaagcggatttcatctataccgttatctgttccgttctagtcttctgtttcttcaatttccgcaagcgtgctaaatgctttgccggtgatgtggggtcggtgagcattgcctttatccttcttttcctgataggcaggctcatcattgaaacggaagatttcagttggatagtccttttatccgtttatggtgtggatagtgtactgactatcattcaccgcctgatgcttcatgagaatatcgggctgccgcatcgcaaacatctgtatcagattatggcgaatgagctgaagattcctcatgtcatagtctctctggcctatatgacaatacagacttttataatagtaggatatatttattaccaacggtatggctatatcttcttgatagggtgtatcttactgttgagcgcaatatacgtactcttcatgaaaaagtatttttcaagacatatctcttgaattactgtcttccattatacaatttccacggtcacctgaatacccaaagctttggcaatacgctcgatatcacgcttctttgtttttgtattgctgcaggtcataagaaaccgtccgttgcctaatggtttttgagcgcgctggtatttctcatgaagtgtgtttgatatcaagggaatcttgcataccttgatatttaaagattgcacttgttccacacctactgtcatcacaaattgccggaaagtctcggctgcttgtgtttcttgaattactttcccattaccaaaagtgatctttaatcgggatattggagtattgctttccgtatcattggttacttggtacagtttctttgctgcttcaagaaatcttggaaataatgttccccactggttgttgacaacaatttttgttccgtctgccaataaaataacttcatcaggcttaagaaagtaacgtttctttaaatcgggatgagatttgattttttcttggacttctatcaaagtacgtattacacccaatgctttactgtgtaaattggatggaaagactttctccagctcaacatagtttatgttgggatggtctttgatataatgcttgattacttccaatacaaaacgtcttttgacatagaagttgattccatccaatgagaattttgtatggtctttggagtcactttctttatagtcgttttgtgagtttttagatgtttgcctcgttttaagctgtaatgaaggcagaatgctcttattttcgtaatgtactgtaagcgtaagattggcaaattcttcattaatggcggattcctcaaatccttcagctgtaaacttgtctttgagcaacgaaatcatattctttaccccattgccttcggataagaattctgacaccctcctatgcagattattacgcgcttggatttttttatattgctcattacagaatgtttctatttttcccagattgaatttgtcgtaagttagcaggtcacagatgatggaaccatttacatcttctttcttaaattctgctgtaaatacacagatgggattctcgccatcgttgggaatgtcgtagtaaagctgtatcttttctcctatatataatccgacattaagtttcagttggcgcatatacgacatcaactgattttcttgcctctcattttgtatattagacggacgttttatttcaattgggagtacgggggattgtgtatcatgttcgttctttcgccaaagtacaatgtccgggcgtatggagttgctattgcctatcggtaatgtatattgggataccattgttccattggtcttcttccatccaagaaatttcaagcagttctctatttcccgctggtaatcaccttctaccgaatttgtttcaaaatacggtatcagtgtttccacaatctcaggccaattttcattcatcttttatcgggttatattaggacatattgtttacacttcttcggagtgtgcataaagcaaatgtattgactttatttgaactgcccaaattatagtcataaaaaatggaatcgggcggtgtacaataaaaacaaatagtcccggattctttgtcaagaatccgggattatttgtttttattgtttttgaggggctttacttagcaggtttcagccatttgtccagccattcaaagaaggtacgttgccacagcacgccattctgaggtttcagtacccagtggttttcgtccggatagataagcagttcggcaggaacgccacgcatcacggctgcatcgaaggcggccattgcctggttggcaaggatgcggaagtccttctctccgtggatgcagaggataggggtgtcccatttgtcgacgaagagatgcggggagttggcaaaagtgcgttgtgccgtagcgttgttcttttcccaataagcgccgcccatatcccagttggcaaaccatttctcttccgtttccagatattgcatttccatgttgaagataccgtcgtgtgcgataaatgccttgaagcgtttgtcatggtgtccggcaagccaatatacggagaagcctccgaagctggcgcctacgcaacccaggcggtctttgtcgacgaaaggttccttggccatttcgtcaatggcagtgaagtagtccttcatgcactggccgccataatcaccgctgatggcttcgttccactctacaccgaagcccggaagaccacgacggttgggagctacgatgatatagtcgtttgccgccataatctggaaattccaacggtagctccagaactggctgacgggactctgaggaccgccttcacagaagaggagggtggggtacttcttgttggggtcgaattgtggaggataaatcacccaggtcagcatctgcttgccgtcggtggtcttcatccagcgggcttccactttacccatttccagctggtcgtaaatctgcttgttttctgtggtcagttgcactgcttctgcaaaagcgtcgccgttgcgtgcactgtttacggcatagatttcgtcgcccatgctcatggagtggcgtttggcgataatcttgtctccgcaaagggcgagtgaagcatagtcgtgcatgccgtcggtgagctgggtaagcttgtcgtttccggcaaggtcgatgttgtaaatctgtgtctcgccatgccatacaccgatgaagtagatgctctgggaatctttgttccacaagaaggcgtccacgttcgattcgaaagctttgcttacaaaacgtttctcaccggtctcgaggttcatgataaacaagcggttcaagtcggcttcgtagccgtcacgctccatgctctgccaggcgatgtatttgccgtcgggagagtattggggattcgtatcatatcccttgttttcttccgtgatgtttttggtttccttggaggcaaggtcgtagatataaatgtcggagttggtggaaatggcatacgccagtccggttttcttacggcatgtataggccactttatcagaagacgggctccatgccagctgctcgataccgccccagggcttcatcgggctttcgtatggctctccctcaagaatatcggtgacattgctgatggcattgccgtcgaaatcagcaacaaacggatggggagcagtagtcacccattcgtcccaatgcttgtacatcaggtcggtaacgataatgccggtggctttaggaaggtccggatgtttgtctgccgtactctttacggtctttacctgggcaatgaaaaggagtttcttgccgtcgggcgagaaagagaacccttcgatgtctccctcgtattgggtcagctgcttgcgtccgctgccgtcgggattcatttcccatacctggctgctgccgctttcgttgcaaaggaaggcaagcttcttgccgtccttaaaccacgtgggctgtccttcttgccaggcgtcatgcgttatctgggtattgtcactaccgtcggcattcatgacgaagacttcgctgttactcttgttctggggcacgctgtaataagataccgtgtaggcaatctgcttttcgtcgggggatacggccatactgccgatgcgtcccatcgcccagagtgcctcgggtgtcatacgctttccttcaatcttgatgtccgaccgctggatgagcgttgctgcgtcctgctgctgtccggcatcttttgtgcctccgcaagaggccaatgtcatggctgctgacataagtagtagatttacttgtttcatatatgctttttgtttcagttattttaatgcaaagatactaaattttccttccttgccaatttccacgtttgatatatagccagcagaaaatgagaataaagctggaataaaccatttccgaggtccagcagatggccacgtcgagttgcagaatcagaataatgtaggtgatataggctgtgtagatgaccagcgtagccatctccaacccccatgccgtacgcgtgttgccggttccggaaactgcctggaaatagacattggcaggaaccaggaacagataggtggagcacatcacccagagcgaatgtacggcagcgtcctgcaggtcgggtatgtcggtataaattcccagaatcagcttggggaacaccgcgaaaagcaatgccagcggaagtacgaagacgtaggctatgcgtacgtgctgccggatggtgcctgccacgcaatcggagtggcctgcaccgatgagattgctgaccagtgacccgcaggtagaggcaaatgccatgagtaccatgaacagtatgccggacacgttgcggacaatgttggtcactgccagcgagcgctctcccagatgctccacataaaggaagaaaaggaaccaggtggagagggagaagaaattctgtatcatggtccagaaagagacgttcagcatccgtttcaatacgtccagccggaacttaggaatacggtccagcccgtacttgcggcagtcgatgcggctgcgggtatagaggatgaagaataacagcgaaaccagctcggccagtgaggagccgatggcggctccggcaatgccgagcgccgggaaaccgaatttaccgaaaatcaggatatagttgaatacgacattgctcaacaccatgacgatggagttcagtgtcagtgtcttggtttgggtggttcccaagaaaaaggcacggaacatgactgcgctgaacgagaagaaggcaccgaatacacgccaatgcaggtagctggtggctgcttcgtagatatgttccgaagcgacgatgcgtttcaggataatcggtgagaaacaataggatagcaggaacatgactgccgccattccgacttggaaatagatgccctgatagaacaagtcaccgatttccttatactgctgttcgccgttacgccgggcaatgagtatctgtgccccgatgctgaaaccgaaggcaaccatgaagatgaccatgtagaagacaccggcgatggcagatgctcccagttcgacttcgcccacacgcccgaggaaggcagtgtccgtcatacctatcagttgctccataaggaggctgattaggatggggtaggctataagccagatctgtttgtaggtgtatttagtctgcataatttagagtctgtgagttttttcattggcgtaaggataagaaagccgggcaaatgtcattgtccggctttctgcaaaagaatatcttgaacggtagtcttactactttttgttctgtctctctttcatcatctgttcctgctgtttctgcatggcttccagacgggcggcgaaaccggttttcttcatcttcttcgggtctttcttgttggcttccaactgggcaagaagggcttcctcattggttgtcttgcgcatgatgagcgttgttaccacactgattaacgtagagatgaagtagtaatagttcaatcccgaaggataatcgttcaatatgaagaggaacatgataggcatcaggtatgacatccacttcatggcagccatctgcggattggcacccgtatcctgctgctgcatcatgtacttcgtgttcaatatgttggtaaccgtcatcagcaggcagaacaagctgaggtggctgcccaggaacgggatatggaacgggaagttgatgaatgcatcataagtggaaaggtcatctgcccacaagaagctctgttggcggagttcaatggcactcggcacgaacatgaacaaggccatcaggatagggaactgtatcagcatcggcagacatccgcccatcgggctgactccgtactggctgtagaggcccatcacttcctgctgcttcttcatggcatcttcctgcttggggtacttcttgtttatctcgtcgattttcggtttcagtacgcgcatcttggcagaagacatgtaggtcttccatgtagccgggaataccactgcctttacaatcagcgtcatgaacaacagtacgatacccatgctcaaaccccaactggacaaccagtcgaagatgttgatggtgaaccatttgtttatccagcggatgagcggccagcccagatagaccagacggttcagctcccacttctcgtcacgccccttgtcgagtgcggtcagagtcttgtagtgattggggccgaagtagaagaacagctgggtaggttccttgccggtaggatcgaacttcgtgctcatctctgcagaatagtccttgatgtagccgctgccttgagtctccatcttggaactcagcttggtcttttcaaagtcggcatctgccaaaaatactgaagagaagaactggttcttgaaagcaatccagtccaggcgttctggaacttccttttcatcgttcttgttggcagacagataatcggtaccctctccggtgattttgtaagtcagttcagccagacggttctcgtaggtgtaacccttctctatttgacgggcacgctgagaccactcgatgtccacataattgttggtagccgccaacttgccttccatattgactgcctggatagtaaagtctatcaggtatgtgtcattgtgcatgcgatatgtaaagtcgatatagctgttgctgtctgccgacaaacgcatggtgacggtactgtccgtacggtttactgcggtgaaataatagtcttccgtctggatagtctctttcttgttgtaaaagaggaaattcatggaagcgtcattgccgctgaacagtgtgacgggggtcgtcttgtcttgtcccatgtattccttcagcgtggccgaagctatgcgcccgccttttgtatctacggttatttctgccaggttgttctggatggttacctgcgagttggttccttgacgggcgtcgaagaagagggcagtggagtcaacgcttgcttccgctccgctttcgttggccagggctgcttccgccttggctttcaagtcggcttcgcgctgttgcacctgggctatggagtcgtagtaacgttgctgtgcttccaactgctcctggctgggacggctcagaaagctgaaacctactaacaatatcgctatcagaacaagacctgtgatggtatttttatccattctttgttgattacagattactaattacaaattatttcttttcgttttcattttcaatggcggccttcacgaatgctacgaacagcgggtgcggatgcaataccgtactgctgtattcgggatggaactgggtaccgacaaaccacttcaatgcgggaatctcgacaatttctaccagatccgattcggggtttatacccacacacttcatgcctgctgcttcgtaggcctccttgaagctgttgttgaattcgtagcggtggcggtgacgctcctggatatgctcggtaccgtatgcctcgtatgccttgctgcctttctgcagaacacattcataggcacccagacgcatggttccacccatattggtgatggacttctgctcttccatgatgtcgataacattgtgcggtgtcttttcatccatctcacgtgagttggcatcggcgtagcccagtacattacgggcaaattcaatggcgatgcactgcatacccagacagataccgaaggtggggatgtcgtgcgtacgcgcatatttgatggctacgaacttgccggcaacgccgcgttcgccgaagcctggaccgataagtacgcctgccatgcctttcagggcttctgccacattctcgtcagtcagcttttcactgttcacgaagtctaccgatactttgcggtcattgtaggttcctgcttgtgaaagggcctcgcggatggacttgtaggcatcctgcaagtcatatttgcccaccaatgcgatgtgcagcggggcagtctcttcggctttgtgacggcgttcgaggaaagcgcgccacggtcccagtcccggagtgtcgccgacgggaagtcccattttcttcaaaatggtaacgtccagtccctggctctgcatcaagatgggcacctcgtagatggtaggcgcgtcaatgctctgcaccacggcattttcgtccacattgcagaacagagccactttcttgcgcagggtggtactcaactcatgttccgtacgcagtacgaggacatcgggttggataccggcactttgcagttcctttacggagtgctgggtgggcttggtcttcagctcaccggcagctgccaggtaggggacataagtaaggtgtacgcacaaggcgtcttttcccagttcccacttcagctgacggatgctttccagatagggcagagactcgatgtcacccactgtaccgccaatctcggtaataacaaagtcgaatttgtatttgtttcccagcagttttacattacgcttgatttcgtctgtaatatggggaataacctggatggtctttcccagatagtcaccccggcgctctttgtcgatgacgcttttgtagatgcgtccggtcgtgatattgttggccttggtggtctggatgcccaggaagcgttcgtaatggcccaaatcgaggtcggcttcgtggccatccacggtaacgtagcattcgccgtgttcataagggttcagtgtacccgggtcgatgttgatgtacgggtcaaacttctggatggttaccttgtaacctcttgcttgcagcaatttaccgatggaggatgagatgatacctttacctaatgaagaggcaacaccaccggtgacgaaaatatactttgtttctcccacaactatattattttattaattgtttaatctaatgccaagagcctatacggcttgtcgttcagggtgcgcactgctcccgtcagtacacgtagaacttaaaaagcgcaaaattataaaaaaaagaggaagtagagaaagtttcgatgaaacaattattaaaaaatacgatttcatcgaagaaagtccttcttgcctttttcttatggcttttctatgttttctaaacattttaagctaaatttgcgctcgaaacatagactttagggcattatgaagaatagacacattgcattttggttaattgctacgatgatttcttcgtcggtgatggcacagaatacgctggataccgcctcgaagaacagtggacaggaaacaactgccaaagccgacaccttgccggatataatgaaagaatacatgattctgaaattgaaaccggaaggtatggggtacaggctggatactgtttccatattatatgaaaggtatatcggagtgctggattatttgaatgaccccacgactccggagcgttatataccttccaatccgaactactataggttgttccttccccttacctattattatgcccccatgagacgcctttccaaggtggactggcatttccaggtgcctgatacggtgcctgccctgacgcgcgagatgttgccgttcgacacactgagtttcacctcaaaggaccgagccaacaaactggtggaccgtacgctgctgaacacgtatgtagattgtcccaatctggttgtaatgaccgagaaggaggtgatgaaagggaagatattcaaggataatatagagaaggaggtttcttccaagccgtccgtcgtgaaactgtttgcacaagagaatatggtgggagtgaaggaggaagccgacgtgattatccacaagcccaactggtgggtgacgggtggaaacggttcattgcagattacccagaactatatctccgacaactggtacaagggaggtgagagcactaacgccgtgcttgccaacctgcaattgtttgccaactataatgaccgtgaaaaggtgcagtgggaaaatctgctcgatgccaagctgggcttcagctccgcaccttccgacgagtttcataactatctggtaagtaccgaccaactccggctgtacagtaaactgggtattcaagctgcgtccaagtggtattataccatcacgactgagtttaagacccagttctgcaatggctacaaggccaacagtgaagagctggtttcggctttctttgctccggcagactggtcgagcagtatcggtatggactacaagttgaagaagcagaaattcagcttgtccgttttcatggctccgctgacgtacatgctgcgctatgtaggaaataagggggtgaatgaagtgagtttcggtcttgatgagggcaaatgcgtgaagcataacttcggttcgcagatacagcctacactttcatggaccatcattccttccatcacgctggattcccgcttggacttccagaccagttatgagtggacacgtattgaatgggaaaacacggtgaactttgtgctgaaccgctatctttccaccaagctctatgtgcacgcccgctatgacgacagtgccaagccgacggaaggggacagctattttcaggtaaaagaattgctcagtttcggtatcaattataaatggtaaataaacaaatggtctgttcggagtgaacagattatctgttttggttagtcagacggtctgtttttccttgacagaccgtctgttttttgtctttttgtagtctgtggcaggtgaaaaaacataaaaacatagaaaaagcacgtttacgaacacagaaaatgcataggaaaggtttgcagttcacaaataatgcgtaaatttgccgcgatttgtaatgcacactttgcaaaatggcgaatactataaaacatcaaggtattgtggaaaacataaacggttctcatctccaagtgagaatcatccagacttcagcgtgcgcttcgtgtagtgtcaagggacattgtacctctgcggatacaaaagagaaacttgtcgatgtggccgatgccaatgccgcatcctaccagcccggcgaccgtgtatgggtgacgggcgaactttcaatgggagtgatggcagttctgtttgcctttatatttcctttccttattctgataatttcactatttgtctttatggctatctggaatgacgagctgcgttccgcgctttgttcgctagcacttcttgtaccttattattatatattgtggctgaacaagtcgcggatgggtaagaagttctcattctccgtacgaccgatgaactaactaataataaaacaaataattaataaacaactaatttatgaatgtaattctgattgcagtgatttcattgggagttatagcgctggtatcggccgctattctttacgtggcttccaagaaattcgccgtgtatgaagatccgcggattgcccaggtagcagaggtgcttccccaggcaaattgcggtggatgtggttaccccggttgtagcggatttgcagatgcttgcgtaaaggcaggttcgctggatggtaaactttgtccggtgggtggacagcccgtcatgacaaagattgccgagattctgggcttggatgccgctgctgccgaacctatggttgcggtggtgagatgtaatggaacttgtgccaaccgtcctcgtgtgaaccaatacgatggcgccaagagttgtgccattgcggcttctctctatggtggtgaaacgggttgtagttatggctgtctgggatgcggcgactgtgtggctgcctgccagttcgatgctatccacatgaatccggagaccggacttcccgaagtggatgaggaaaagtgtacggcttgtggagcttgtgccaaggcttgtccgaaatctattattgaaatccgtcctcaaggcaagaaatcacgtcgtatttacgtacagtgtgtaaacaaggacaagggggccgtagcacgcaaggcttgtaccgtggcatgtatcggttgcggcaagtgtgtgaaggtttgtccgttcgaggctatcacgctggaaaacaatctggcttacattgaccccaataagtgcaaatcctgtcgcaagtgcgaggaagcttgtccgcaaaacacaatcattgccctcaacttcccgccgcgcaaaccgaaggctgacgatgcagctccccaagtaaaggttgcagctcctaaagctgaggttgagactcccaaagcagaggtttagacttcccaagttgaggtatgaattaataaagtaaataaacgactaaaaatacagaattgtatgttgaagacattttcaattggtggagtccatccacacgaaaataaactttcagcacatcagcctatcatcaaggcagagattccggccaaggccgctatcttgctgggacagcacatcggtgctcctgccaagcctatcgttgccaaaggtgatgttgtgaaagtgggtacaaagattgccgagcccggcggttttgtatcagcagccattcattcgtctgtcagcgggaaagtcgctaagattgacacgattgtcgatgccagcggttacgccaagcctgctatattcattgacgtagaaggggatgaatgggaagaatccattgaccgttccgaaacgttggtgaaggaatgcagtctgacctccgaggaaatcgtgaagaaaatcgctgatgccggtatcgtaggtctgggcggtgcatgcttccctacgcaggtcaagttgtgtcctcctcctgcattcaaggcagagtgtgtcatcatcaacgccgtagagtgcgaaccgtatctgactgccgaccatcagctgatgctggaacatgcggaagaaattatggtaggtgtatccattctgatgaaagcggtaaaggtgaacaaggcattcattggcattgagaacaacaagcccgatgccatccagctgatgacgaaggttgcttccagctatgcaggtatcgaggtggtacccttgaaggtacaatatccgcagggtggtgaaaagcagttgattgatgctgtcatcagtcgccaggttgcagccggtgcgctgcctatctccacgggagctgtggtgcagaatgtgggtaccgcatttgccgtttaccaggccgtacagaagaacaaacctctgtttgagcgtgtcattaccgtgactggtaagtcgttggcaaagccgtccaatttcctggcacgtatcggtacgccgatgaagcagctgattgaagcttgcggcggtctgcccgaagatacgggcaagattatcggcggtggcccgatgatgggtaaagctctggtaaatacggatgtaccgacagccaaaggaagctccggtattctgattatgaacgagaaggaagccaagcgcggcgaggtacagccttgtatccgttgtgccaagtgcgtgggagcctgcccgatggggttggagccgtatctgctggctaccgtttcggcccacggagattttgaaagagtagagaaagaagacattatgtcgtgtatagaatgcggttcatgccagttcacttgtccttccaaccgtccgatgctggattatatccgcttgggtaagggtaaggtaggagcgatgatccgtgcacgtcaagctaaaaaataacgaagtatgaataaattaatcgtatccctttcgccccacgttcacggcggtgacagcgtgaagaagaatatgtacggtgtgcttatcgcattgattccggcattcctcgtttcgctttactttttcggactgggtgcgctgattgttacggccacttccgtagcagcctgcttgttctttgaatgggccatcggcaaattcctcatgaaaaaagagaccacaaccatcaccgacggctctgccatcattaccggtgtgttgctggcctttaacctgccttccaacctgcccatctggataatcatcctcggcgccttgtttgccatcggggtaggcaagatgtccttcggaggtttgggttgcaatccctttaaccctgcactggcaggacgtgtgttcctgctgctttcattccccgtgcagatgacgacatggccggccgtaggccagttgacggcctatacggatgccacgacagctgctacgccgctggctattatgaaaggtgtcatcaatggtgctccgggcatgtccctgagcgaccttccgggagctttcgacctgctgataggtaataatggaggatgtctcggtgaggtgagtgccttggcgctgctgcttggtttgttctacatgttgtggaagaaaatcatcacctggcacattccggtatctattctggtgacggtattcgtgttctccggtatcatgtatctggtcaatccggaactttatgtatccccggtcgtacagttgttgtccggtggtctgatgctgggtgctgtctttatggctacggactacgtgacttctccgatgagccacaaaggtatgctgatttatggtgtttgcatcggcctactgactgtcatcatccgtctgttcggtgcatatccggagggtatgtcgtttgccattctgattatgaatgcgttcactccgctcatcaacacctatgttaaacctaaacgctttggggaggtagcgaagaagaaatgaaaaagttagaatcatccttgaagaatatgttgctggtacttacgggcgttaccgcaatctccgtagcgctgctggcttatgtaaacgaattgacgaaggagcccattgcgcaggccaatgcaaagaccttgagcgatgccgtaagtgcggtggttccgggcttcgacaatgaccccatcgccgagaagaagatgcaggaagtaaacggagtacagtattctgtatatcctgccaccaaaggcggagaatatatcggagctgctgtggaagctgttgccatgggttttggcggtgagctgaaagtgttggtcggtttcgatgccgaaggcaaaatcatcgactactccttgttgtcgcatgtggaaactccggggttgggctccaaagctgccgactggttcaagaaaggcaataaaggtgacatcaccggcatgaatccgggtgaagcggcattgacagtgagcaaggacggtggtaaagtagatgccattacagcgtctaccatcacttcacgtgcttttttgaatgcagtgaatgcggcttatgctgcctatgccggtcaggaaactgccgacggcactaccggcgctactcaaaagaatgttgaacaacctgctgattccgcagctcccgaagctgtggatacactcagcgctaaataagaaaggagtagaagatatgaataattttaaagttatgatgaacgggattatcaaagagaatcctacgtttgtactcctgctgggtatgtgtcctacactgggtaccacttcctctgctatcaacggtatgggtatgggactggctacaatgttcgtgctgatatgttccaatgtggtgatttctgccatcaagaatctgattcccgatatggtgcgtattccttcattcattgtggtcatagcatcatttgtgacactgttgcagatgataatgcaagcctacgttcctgcattgtacgccacgctgggcttgttcattccgctgattgttgtaaactgtatcgtattgggacgtgccgaggcatttgctgccaaaaacaatccggtggcttccttgttcgacggtctgggcatgggcttgggctttaccattgcactgacattgctgggtgccgtgcgtgagttcctgggaaccggcaagatattcaacttgagtatccttcctgaagaatacggcatgttggtatttgtccttgctccgggtgcattcatcgcattgggctatctcattgctttaatcaacagtatgaagaaggcttgataatggatgattgataatggttcattatcgattgtcatttttcaattaataaattaaagaaatggaatatatattgatatttatctcggcaatctttgtaaacaacatcgtattgtcgcaattcttgggaatttgcccgttcttgggagtttccaagaaagtggagactgcattgggcatgtcggcagcggtggcattcgtgctcaccatcgccaccatcgtgacattccttattcagaagtatgtgctcgacgcttttgatttgggctatttgcagactattacctttatcctggtgattgccgcattggtgcagatggtagagattatcctgaagaaagtttctccttctctgtatcaggccttgggcgtgttcctgccgttgattactaccaactgctgtattctcggtgtggccatccttgttatccaaaaagattatgatttgctgacgggagtggtttatgcattctccacggcacttggtttcggcttggcactgacactgtttgcaggcctgcgcgagcaaatgagcctggttagtgtgccgaaaggtatgcagggcactccgatagctttgattacggccggactgctggcaatggcattcatgggcttttcgggggttgtgaagatttaaagaagaaaaaccggaaataaagtgaaggggggataagctaaaatttatcccccctttttctgtttttattaatttatttccttacatttgtggcgtattgataacctaaaagctaaattgtctatatttaatatgaaagagaaaattttagttacgggtggaaccggttacattggttctcacacggtggtggaacttcaaaacgcaggttatgaagttgttattattgataatttgtcaaactccagcgcagatgttgtagataacatagagaaggtatcgggtatccgtcctgcattcgagaaattggattgcttggattatgccggtcttgacgctgtgtttaccaaatataaaggcattaaagccatcattcactttgcagccagcaaggccgtaggtgagtctgtccagaaaccgttgctttactatcgtaataacctggtttcactgattaacctgctggaactgatgccgaagcatggagtggagggtatcgtattttcttcttcctgcacagtttacggccagccggacgagcttccggtaacggaaaaggcacctatcaagaaagctgagtctccgtatggaaacacgaagcaaatcaatgaagagattgtacgtgatacggttgcttccggtgctccgataaacgccatcttgttgcgttacttcaacccgataggtgcacaccccacagcattgctgggagaattgcctaacggtgtaccgcagaacttgattccttatcttacccagaccgctatcggcatccgtgagaaactgagcgtgtttggtgacgattatgatactcccgacggttcttgtatccgcgacttcatcaatgtagtcgatttggccaaagcacacgtagtggctatccgccgtatcttggagaacaagcagaaggagaaagtggaagtattcaatatcggtacgggtcgtggactttccgtattggaactgattaatgctttcgaaaaggctaccggtgtaaaactgaactatcagatagtaggtcggcgtgccggtgatattgagaaggtatgggcaaacccggaattggcaaacaatgaactgggttggaaggcagaaacaagtattgaagatactttactttctgcatggaaatggcagttgaagcttcgtgaacgaggtattcaatgacaaactttgaatttgtgttttttaacaaataagcaataaacaaatgcctccccgcatttgtttataatgtgcaaatcagcctgaagctgtttatgtatatgtgaatatccgtaactagtacgtatgcctccccggcatagacaggtaagattgcatagtagttttgtcgtgttttattttgtgtttgtgttgtgaataagccttgtcgagagacaaggcttatttttttgtatattatatacggaatctttattgccaattctgtggtttttcataagatgggtgggcaattccttttcttgccaattgttaactgacgttatcatgtctgtagcaatttgttccaattgtagtattaatcgttcaaaatagtattttttgttcaaaaaatgctatacacggtaacaactacatgcaaattgtttatacatttgcgttgttgtttatgtaactattgggatgaacaaaccgttgctgacaaacgttaataggtacgagtacttatatagctgacgaaagacgcgacttggctgatttgttttagaggatacacgcgacttacaacttagtattgggaaaaataattaaggaaatatagaataaaaaagattgcttatgtcacagattgttggacatatctcacaggtaatcggacctgtagtagacgtctatttcgaaggaacggaggcagagatgatgttgccgagtattcacgacgcactggaaataaaaaggtcgaacggaaaaagactgattgtagaggtacagcaacacattggtgaaaacacggtgcgtactgttgctatggacagtacggacggcctgcagagaggtatgaaagtgcatccgctgggaggccccatcaccatgccgataggtacacaaatcaaaggccgcctgatgaacgtagtgggcgactctatcgacggcatgaaggaactggaccgtaccggtgcttatcccatccatcgcgaaccccctaagtttgaagatttgactaccgtacaagaggtactttatacaggcatcaaggttatcgacttgctggaaccctatagcaagggcggtaaaatcggtctgtttggtggcgccggtgtaggcaagacagtgcttatccaggagctcatcaataatattgcgaagaagcagcacggcttctctgtgtttgccggtgtaggagaacgtacacgtgaaggcaacgacctgctgagagaaatgattgaatccggtgttatccgttacggagaagaattcaagaagagcatggaggaaggccattgggatttgtccaaagtagattatgacgaagtggccaaatcacaagtgtctttgatattcggtcagatgaacgaacctcccggtgcgcgtcagtccgtggcattgtcagggttgacggtagccgagtccttccgtgacatgggagcggagacggacggtccgcgtgacattctgttcttcattgataatatcttccgtttcactcaagccggttccgaggtttcggctttgctgggccgtatgccttctgccgtgggttatcagccgacactggcaacggaaatgggtgccatgcaggagcgtattacctctacgagaaacggctccatcacttccgtgcaggctgtatatgtgcctgccgatgacttgactgacccggcgcctgctacaacatttacccacctcgatgccaccacggtgttgagccgtaagattaccgaacttggcatttatcctgctgtagacccgttggaatccacttcacgcattctcgacccacacatcgtgggggtggaacactacgaagtggcacaacgtgtgaaacaaatattgcagcgcaacaaggaattgcaagacattatctccatcctcggtatggaggagctctctgatgccgaccgtacgttggtgaaccgtgcgcgtcgtgtgcagcgcttcctttcacagccgtttgccgttgccgagcagtttacgggtgtccccggtacaatggtttccattgaggatactatcaaaggcttcaagatgattcttgacggagaggtggactacctgcccgaaccagctttcttgaatgtgggaaccattgaagaagctattgagaagggtaagaaactactggaacaggcaggggaaaaaacgattaaaaattaaaactctgggagctttgataatgaagaagttgcatttgaatattgtttcaccggagaaggaactcttcaacggggaagtggaaagtgttacattgccgggcactatgggctctttttctatcctgccgcagcatgcaccgattgtgtcatcgttgggaacggggacattggtttacgcaacggacggtgaggaacatgagctggatattcaaagcggattcgtagagatgagtaacggaagggttgccgtctgtatagaacagcaataggcaattaaaaataagaaattgaagattaaaggttgttggcgtgactattactaagagaaactacttattgcatacagcgctcttgacggtattgataggaattgtaggcggatggacgtacttttcgataaatccgcatcactatttcggcggttatccgctgattccgcttttcttctttgttttcggaatattcatgattaatatgaccgaaagctgccgtcaccggatgccgggacgaatgttgcagatttatctgctgatgcgtgtgatgagaatgctggtttccatgattgtgatgctggtttattgcgttgcagtacgtgaggaagccagggcgtttctgttgacgtttatagccaactatctgatatatttgatttatgattcctggttcttcttcactttcgaggcgaacaagaaacagaaaaagaaaagtaacaatgaaaagattgcgtaacatactgactgtagttctgttggcattgggcatgttgctacccgccacggtgcgggctgagaatacggtggacgtgaaggagattgtcttcgggcatatcggcgattcttacgaatggcacatcacgacgtggggcgaaactcacgttacgattcccttgccggtaatagtgcatagctctaccaccggatggcatgtctttctatcctcacgtctggaggagaacggtggaagttatgaaggcttttccatcgctcccgcaggaagcaagtacgaaggcaagctggtggagcatgatgccaccggaaacgaaatacgcccgttggatatctccatcacgaaggtgacactggctttgctcatcaacagtgcattgctgcttgtcatcattttaagtgtggcgcactggtatcgcaagcacccgcagggaagtgccgctcccggtggtttcatcgggtttatggagatgtttatcatgatggtgaacgatgatattataaagagctgtgtcggtccgaagtaccgtaaattcgcaccttacttgctgacggccttcttctttattttcatcaataacattatggggctgattcctttctttcccggaggggccaacgtgacgggaaatatagccattacgatggtattggccatctgcactttcttggccgtgaatatctttggaaccaagacctattggaaagatatcttctggccggatgtgccctggtggctgaaggtgccggtccccatgatgccgtttatcgagttcttcggtatttttaccaaaccgtttgctttgatgatacgtctttttgccaatatgctggcaggacacatggcaatgctggtgcttacctgcctgatattcatctcggccagtatgggacctgctttgaacggaacgcttaccgtggcctcggtgctgttcaatatctttatgaatgcacttgaattgttggttgcctttatccaggcatatgtgttcaccatgctgtcagccgtgttcatcggtctggcgcaggaagagcataaggagaaggcggtgaaatgatacgattattgggaatataaatattaataaaaataaccatttaaaaactgaaagttatgttactatctgtattattgcaagctgctgcggcaggtgtgggagttagtaaactgggtgcagccattggtgctggtctggctgttattggtgctggtgtaggtatcggtaaaatcggcggttctgccatggaggccattgcccgtcagccggaagcatccggagatatccgtatgaacatgattattgccgctgccttgattgaaggtgttgctttgttggcagtagttgtgtgtttattggtgttctttttataatgtacaatctaccatttacgatttacaatttgtccgtgcagcatcaccgcgcagccaaattgtaaatcgtaaattgtcaaatcgtaaataaaattatgtcattgttattacccgatagtggtctgctgttctggatgcttctttcattcggtgtggtgtttgtggtgcttgccaagtacggttttcccgttatcaccaagatggtggaaggtcgcaagacctacatcgaccagtctttggaagtggcacgcgaagcaaatgcccagctctccaaactgaaagaggagagtgaagcgttgattgctgctgccaacaaagaacaaggacgcattctgcgggaggcgatgcatgagcgtgacaagattatcgtcgaagcacgcaagcaggcggaagccgccgcgcagaaggagctggacgaagttaaaaagcagatacagcaagagaaggaagaggccatccgcgatattcgccgccaggtggcagtcttgtccgtagatatagctgagaaaattatccgcaagaatctggacgagaaacatgagcagatggagatgatagaccggatgctggatgaagtgctggccgcaagtagaaacaattaattctcaaagaaatggatataggaatcgtttcgatgcgttatgcgaaagcattgatggaatatgccaagagtatgggggtagaagatactctgtacaaggagttttgtatgcttgcccgtagcttcaggaaacatccggatttgtgcatggcattggaaaaccccatcctgacgatacgtgagaagttcacacttatctgtaccgctgctgtgggggatgctcctgcgggccgtgagtttgcgcgtttcatgaccttggtgttgaagaaccggcgggaaaactttctccagtacatctgcctgagttttctggatttgtaccggaaagacaagcatatcggtgtaggaaagctgataacagccgttcccgtcagccaggaagtgcgggagcgtatccataacagtgcttccaccctgctgcatgccagcatggagctgcagactgaagtggatccctccattgaaggtggttttatcttcgacatcaacgacttccgtctggatgccagtattgctacgcagcttaagaaagtgaaacagcagtttattgataagaatagaaggatcgtatgatttacgatttgacaatttacaatttactatttaatagtcttgtgatgcgtaagttgtagaggtcaaaacggtatatgattcgggttctttcaaatagtaaatagtaaatcgtaaaatagtaaatactaagatgttgtctgaaaatataaaagtaagcgaagtctccgatattctccgcaagcaactggaagggattgacacccgcgtacagttggacgagattggcacggtactgcaagtcagtgacggtgtagcccgtatctatgggttgcgcaatgccgaagccaacgagttgttggagttcgacaacggcatcaaggccattgtgatgaacctcgaagaggataatgtgggtgctgtgttgcttggccctacggataaaatcaaggaaggcttcattgtaaagcgtaccaagcgtattgcttccatcatggtgggagagggtatgctgggccgtgtaatagaccctctgggtgcgccgcttgatggcaaaggactgataggcggagaactttatgaaatgccgttggaacgtaaggcaccgggagtcatcttccgccagccggtgaatcagccgcttcagaccggtctgaaggctgtggacgccatgatacctattggtcgcggacagcgtgagctgattatcggtgaccgccagaccggtaagacagccattgccatcgataccatcatcaaccagcgtgccaattttgaagcaggtgatccggtatattgcatttatgtagccattggccagaaaggttctaccgtagcttctattgtgaataccctgcaccaatacggtgcgatggactataccattgtggtggctgctacggcgggagacccggctgcattgcagtattacgctccctttgcaggggctgccatcggagagtatttccgtgataccggccgtcatgcgctggtggtctatgacgacttgtccaagcaggcggtggcctatcgtgaagtgtctctgattctgcgccgtccgtcaggacgtgaggcctatccgggtgatatcttctatctgcactcccgtttgctggaacgtgcggcgaagattatcagccaggaggaagtggcacgcgagatgaacgacctgccggatagtctgaaaggcaaggtgaaaggtggtggttcgctgactgcattgcccattatcgaaactcaggcaggagacgtgtccgcctatatcccaacgaatgtgatttcaatcactgacgggcagatattccttgatacgaatctcttcaaccagggtaaccgtccggccattgacgtgggtatctccgtgagccgtgtgggtggcaatgcccaagtcaaggcgatgaagaaggtggcaggtacattgaagattgaccaggcacagtaccgtgagctggaagcatttaccaagttcagtggtgatatggaccccgtgacggcattgaccatcgacaagggacagaagaatacgcgcctgctggtacagccccaatacagtccgatgccggtagaaaagcagattgccattctttattgcggcacacacggcttgttgagggatattcctttggacaaggtcagcgagtttgaacgcaacttccttgagtctcttgagatgaactatcgcatggaggtactcgacgttttaaagacaggtgtcatcaacgacgatgtctgcaaaaagattgaggagacggcagaggcggttgcaaggcaattcatgtaatgtacaattagacaatttacaatttagctgcgccataacccgcatggcaaattgtacattgtacattgtaaatcgtaaatagatatatggcttcactgaaagaggtaaaaaatagaataagctccgtcaagagtacacgccagataacatcggcgatgaagatggtggcatctgccaaactgcacaaggcgcaggggcggattgagaatatgctgccttatcaacggaagctgaatgagattctgacgaactttctgcgtacggatgcttccttcgagtcgccctataccgagaaaaggcccgtgacgagggtagcggtcgtggcgttttcgtccaatagttccttgtgcggtgcattcaactcgaatgtggcgaagatgctggaacggactttggaaggttaccagtcgctgggcaaggagaatattctgatatatcccgttgggagaaaggtggaggaagctgtcaagaaaatgggatatgtgccgcaaggcagctatcagttgatggcagacaagccttcgtacgttgaagcgtatgagctggcggagaagctgatgcatgagtttgtggaaaagcaaattgaccatgtggagctgatttaccaccacttcaaatcgatgggttcgcaggtgctgcttcgcgagaattatctgcccattgacctgacgcaagtggcgcaggaggcggcagaagatgtaccggaagatgcccgcagtttcaataatgattacattgtggaaccttccgtcggcgagttgatagcggaacttctgccaaaagtgttgagtcagaagatatttaccgtgcttctcgattccaatacttcggaacatgctgcccgtatgcttgccatgcagacggcgacagacaatgccaatgagctgattcaggatttgacgaaacagtataacaagagccgtcagcaggccattacgaatgagctgctcgatattatcggcggtagcttgaaatagtccggattgccccgtaaagggctttctcaggatgggtacaaataaatggaataataggacaaggataacgaaataaccgctatctttgtcctattatcatatatggctactgatgaaatccgtatcattctgagagagagcggattggttgaataataaacatatccatggagaataatcccgaaatagcgcttgcatggcaattcattgaaaacacaggcactcatctttttttgaccggcaaggcaggtaccggtaagacaactttcctgcgaagactgaaggcagagagtccgaaacggatgattgtacttgcgccgacgggaattgccgctatcaatgcaggcggtgtcaccatccactccttttttcaagtacctttcgctccttatgtgcccgaaagctcattcagcgcggatggcaaagcatcttaccgtttccgttacgggaaagagaaaatcaacattatacgcagtatagatttattggtcatcgatgaaatcagtatggtccgtgccgacttgctcgattcggtggatgccgtcttgaggcggttccgcgaccggaacaaaccttttggcggcgtgcagttgctgatgattggcgaccttcagcagcttgctcccgtagtgaaagacgatgagtggcagatgctgcgcaaatactatgacacgccctatttcttttccagccaggccttgaagcagacggaatattgcaccatagagctaaagaaagtctatcggcagaacgatgggacttttcttgaattactgaaccgcattcgcgaaaaccgttgtgacggacaagtgctggaagccttgaaccgccggtatattcccaatttcgtacctgataaagaagaaggatacatccgcctggtgacccacaattatcaggcccaacggattaatgaccatgagctggaacaacttccgggacgctcgtatgcctttcgcgccaagattgacggaaagtttcccgaatattcctatcctacggatgaggtgctggaactgaaacgcggtgcccaggtaatgtttgtgaagaacgacacctccggcgaacaccgttactacaatggcatgattggagaggtgacagccgtgtcggcagatggaattgaagtgcgcagcaagggaagcgacgctaccttcttacttcaggaggaagagtggacgaatgccaagtatgtgcttgatgaggaaaccaaggagattacagaagatattgaaggaacattccggcagtatccgttgaaactggcttgggcaattaccatccacaaaagccagggactgacgtttgaacgtgccgtgattgatgccagcgcctcctttgcgcatgggcagacgtatgtggccctgagccgctgcaagacattggagggagtggtgctcagtgccccgctttctgcaagagccataatcaatgacaatgcagtggaaaccttcacgatggaggcacggagaaacgagccggacgagaaacgcttccgttccttgcagcagacctatttcctggaactgctgtcgggcttgttcgatttccagcccatggagcaggctttgcggcggtatgtgcggctgatagacgagcacttgtacaagctctttcccaagcaactcgcagcctgcaaggaggaagtggaacgttttcacgacaaagtgacgaaagtggcccagaagttcggtatccagtatacccgtctgattgatactgcgcaggactatgcagccgacccgactttgcaggggcgcatacactctgccgccacttattttcaagagcagttgcaaccgctggatgcggtgatggcgagtacggtaacttccgacaataaagagttgaagaagaagctccgggatgccatggaggaactggaggcaatgtttgacttgaagactgatttgctggattatgtactggagaatggtttccatgtggcaggatacttgaagcagaaagcactgctttccattgacgattcggcttcgcagaagggtaaaggcaaagggagaagtgctgctgccaaagaagggcagggaagcagtaagcaggctgataaagagaaacgtccgcgtgagcggaaacgcgatgctgcagctgttgaagtacccacggatgtgttgcatccggaactttacaaccgcttgatggcatggcgcaatgcagaagcttccgcattagggttgcccgtatataccgtcattcagcagaaggcaattctgggtatcagcaatctgcttccttcggataaggccatgcttgtacgcattccgtatttcggaaagaaaggggtggagaaatatggagatgtgattctggagatggtacgtgtgtatcgcaaagagaaaggactggcagagccggagttgctgtagtcgaatctgctgccatccgaacttgcattatttactatccgaacatcagctttattccttccttcagcgtatgcggtcgatatcccagttcccggcgtgccttttctatactcagcccgctgaaacggggacgtggcgtcttttcattcatctccttcgtagtgacgggacggatgagcgagcgattcagtcccaatacgtccgctacccgataagcgatgtctgcaatggtcaggcactcgctgccacagagatgatagataccgttttgcggatgacttatcagcttctccactccttgcgacacgtctcccacgaaggtgggcgtacgccattggtcggacacgacgaacacttcctcattgctccttaatctgtttgccaccagttgaagcacattgccatgctgtccgggcagggaggcaccgtacaccaccactacacgcacgatggcataatccttgcaaacggcagcgatacgtttctcaccttccagtttggtgtagccgtaataattaacgggagcgggaatatcctcctctgtatagggtcggtccgtatcaccaccgaaaacgaagtcggtggaaagatggataaaacggctgcctcccgtctcacagcattctgccaggtgctctacggcagtgatgttgacggcatccgcttctgcatggtgcgtttcgcaataatcggggacggagagggcggaggtattgattacaacatccggctgtacttcctggaaaagcttttccaccgcctggcggttgcatatatccgtgcggataaagcgatagttgcccgaatggggacagatgtcgtcgtgcagggaacagcccgttgtctgataagacaagttgcgggacaaatcatccaggatgcgcctgccggtaaaaccgttggcacctatcaccagtattttctttcttgccattgactttggttgttaaatggtgtgggcatcaatagggcacatgcctgccttgctgtacctcgatgcgtatgccaaaggctccgttggctgatttcagctcgaacgcccctttgaaattgttcttttcccaaggcagtgcggaagggttgggcactttccagccgtccttgtcatattcgccgtacgtatggatgcgcatgccgttcttcaaagtgaaacttcccatttgcaggttgtcagtagagccccagaagcccgtcagtccgaagggattcgaactgaaataccgggagttgctgagtgagaatatgttcgaaaggccttgtgaataagtcacgttcgggttcaaccggaagatgcggctgtagtccttgctggcatccggtatctccaaagtgaatttgggaagagtgggggcagacagattcatcagccccatatccagcaggaagccgtcgtaattcttcacgcccggcagaagctccttttcagacggagacatgccttcgggagacgcttcgccatgtactgcagtacgtaccgtatcggcaggcatctcgctctgtgcgctgacggatgacatgcctgcaagtaaaatgatgatgcagaagaagattcgtttcatagttctttgttcacaatttcagttgctgtctgccgcataggggcggactgaacaaagatactcgtttccctctatttccggaaatatctttgtattatttctatttctttatacgaatggtaggggcgaagacgggcgaagtcacccatttcattttggtggggtcgtagctccgttccaggcctccgttgaggtcgagccagtccgtcactttcagttccagtaccatgccataaccgctttgcggatacatcgggttcatatatccatgaaaggagttgcttctcccgtagcccgaatactggccgaaggcatgcaggcgcatgtagggattgatgcggtaggatacggaggcattgtaacctacgtcccattgggtaccccggggggcatcccttttggcataccgggcgccggcaatggaggagggggtagagatggaatagtgggcggcatacactccgccgctcagttcccaatgtccgtcgggactgtaataagtaattcctgcgccagcctgcatgatggagcccattgcaggataggtgttatggctgccgtacatcgtcagtacgacttccggcgagagcaggaaatcggcgaaacgctggaagtcccattcaaagatgttcttctgaaagtgtatcttcttcatgtccgtccagggcaggggctccacatagtcggagggagggagatggagatttatctcttcctgctgttcgccctgcagactttgttggggctggctttcatcaaggcccgtacgcttgttctcttttggagaaaagggaatctgctctttctttacgggaggccggttctttattgtgtcttccggaatctcgctctgtgcataggcgcagagtgaggaacagataaaagtgatgaataataactttctcataaatagtagtttagttttagtttagttcactattagtttatatcctattccccgcacattgacgatacggatgcgctcgtctccggccagtttatgccgcagtttggtgatgaacacatgcaggctgcgggagttgaagaagctgtcgtctccccagaggtcgagcaatacgttctgggtgttgaccacctggttgcggttctcgcaaaggcgtttcagtatttcggactcgcggtgggagagttccacttccgtatccgcgttaggtgaagtcggggtgctgcctgcaaaagcaagtcgttgagtgacggaattgaaacggtagtcaccgatttcaaaaacggtagtttctttgggcttttcttctgtaaaggagaaagctttgcctaccagggcctttatgcggataatgagttcctgcattccaaaaggctttttcaggtagtcgttggcacccagctcaaacccttccaccacatcgttgatggcggagcgggcggtaaggaacagtaccggggtctgtttgtcggtctgccggatgcggcgcaccatttcaaagccgtccatgcggggcatcatcacgtctgccaccagcacgtcgggacggaggtcgaagaacttgcgcaatccctcttcaccgtctgctgcggtgtggatgatgaagttctgtccttccaatgtgtccttgataatcatggcgagggtctgttcgtcctcaaccagaagtacagttatcttttccataattgtcgcttttgttacaagtaatgtaaagctccttaacaagtaatgtaaagtaccctaacaaataatgttatcatatccttatcgtaaaggtacttccttttcccaactcactctttaccgatacgctgccaccatgcttctctatcatggtcttcacatagaacaatcccagcccatagcctttcacatcgtgcagattacccgtgggtacgcggtagaatttgtcgaagatgtgcttctgcttctcgggagcaataccgataccgtggtcgctgacggagatttcggtctgttcattctgcccttcgacggttaccttgcggcaatggatggccacttcggcttctccgtgcgaatatttgatggcgttgtctatcaggttgctgatgatgttgctgaaatgcgtacggtcggcaagtacgctcaaatcttccggttcgatgtccaccgatatgtggacggagctttccgctttcagcttgtgttgttcgatgagcgtttccagaatatcacgtattgcaaactcctccgggtgcaggcggaaagtcctgcggcgttccatactcatggaaagtatctgttcaaccagtccactgaggcgctgaagctgttcctggcagatacgcaggtatttgtcgcgtttggccttttcctccgcttggttgaagttgagcagagcgtcgttggcggcatatgctacggcgatgggggttttcagttcgtgggtgatgttgttggtgaaatcgctcttcatctcttccagtgtcttctgtttcaggatggtgcgtatcaggaaccagaaggagaaagcgagtacgatcagaataacgaatgatgtggtgagaatgcccgacatctgtcgcaagaccaacatgccggccggttccatgatgagacggtagctttgatttgtattgatgtcgaaagaataattatattccacggcttttgaggtaggcacatagccgggggtaccgatgtttaccaatgtatctatatagagaatggtagagtcccatttgctgcctttgtgaagatgtagcagcctatggggaagattgatgttacggtcatgcaggaatgaagtcagcaggctgtcataaagcactacgtcggggtcggaaatgatgtccagtcccgaatgcagtccgcgctggaggtaggtggcgagttccagcatactgttttggtcgcgcaaaatcacatccagtccccctttggcactcaatgcggattggggagagctgtctgagtccttgactgcttcttccagacgctctcgggcagaatcggcagacatccaacggactttatccgtttctctatgctggtcgatgaaaagcacactgtcctctttggtgagcaaaggaacgttcttcctgacactgacttccacgcgggttgaatcgttcgggtgggtcacgtaaacactgtctcctttgggcatgaaggtttcgtgcagggtggtgttgtccaaagaatcttcacgggagatggtggtactgctacggacaaatgattttccgtcatcgctgtatccggctgatacgctgacttcaccgtggtttatgtcgtcctgcttcattttatccacgcgtatcatcatttcgttatagtcgctcatgcgcatggcttcggtgatgtccctttccatttcactgtgcatggtatggtagagccccgtcagccagtaggcttggtaggcgaagatgccggccagggagacgatgacaagtatggcaatatatttgaatggcagtttcatgtttgtttccggttacttttatacatacaaaggtaagattaatattgtgaaccctatcatccgataagactaaataacactcccgataacactggataacacttggtaagccgctgataacacaagtttctgctgattctgccgtactttgcagacgaagatttgcagaagaagaatataaacataaataaaaagaagaacatgaaacgattctatttattccctattgtatgctgtgctttgagcatcagcctttcggcacaagagaacaacggtactgcaaccacctccggtgcggacgacaaccgcatcctcagcgccgacagccttatcacgaccgatgcccgtctggacagtctttatcagaccttgccggaagtgatgattaccggtgaacgccccatcgttaaggcagcgcaaggcaagctggtgtacgacctgccccgccttatccggaacctccctgtagacaatgcctacgatgccgtgaaagagcttcccggcgtcatcgagatgaatggcgggctgcagttggcaggccagggagtcaccgttatcctggacggcaaagtaaccaccctcagcacagagcagctctattccttgctgcgcagcatccctgccagccgcatagagaaggcggaagtgatgtacaacgcccctgcacgctaccaggtgcgtggcgcactgatcaatatcaccctgaaacaatcggtaggcggccccggctcctggcaaggcgaactctatgccaagtatcgccagaagcataacgaaggctttgaggaacgcgccagcctgctcttcagcaaaaataaattctcagcagattttctttactcgcacagtcatggccggggctactctactaccgacaaagaggctgtgcacactctggcagacggctcggttcaccccatgacaacagatgaggtgggccgtggccgcagccatacccataatttcagggtaggggcggactataacatcgccaaggaccatcagctgagtttcgtctataacggtggctattccacctcccacaactggacgggcgtgacgggcacgcaggtgtccacaactcatggcaatagcaccgactggctgcacaacggccgtctggactatcgtacccctttcggcctcaaagccggtgccgaactgacctactaccgttccccgtccgaccagttgctgcatagccgcatgcaggatgaggaacttgacttctacaccgaagattgccaacgcatcaaccgatggaaattctttctggcccaggagcatagtctgggaaaaggttgggatttgaattacggagccatctatactaccagcatcgacaacagctaccaatattattacgaccccgaaaccggcgaacaactgacctcctcagatgcattaagcaatatgaagtcccgccgccgcgaacagacctggaatatctatgcaggtttcagcaagagtttcggcgacaaactcgctttggacgcttccctggctgtggagcattacaagactcccgtctggaaccagtgggactggtatcccatcgtcaacttgaactatatgccggcaccgggacatatccttcagctctctctgagcagcgacaaggactatcccgactactgggcggtgcaggatgccgtctcttacatcggcggtggatactctgagctgcatggtaatccgttgctgaaaccggcacaagagtatgagctgaaaatgacctatattttgaagagcaaatacatcttcagcgcctggttcaaccacaccaaggactactctgtacagacactctaccaatcctccgaacgtctggttgaaatctacaagacactcaattttgattatcagcaacaagcaggaatacaagcctctatcccatttaaggtgaaggattggttgaattctcgccttaccctcataggcttgtggcaccgcgaaaaggatggtgatttctgggatattcctttcgacagaaagcaatgctatggcattgcccagatgagcaatacttttactctctccaccaaacccgacttgaagctgacggtgaccggctttgtgcatagtaaagccattcagggcatttacgacctgcctacgtcgggcaatgtgaatattgccctgcgctacggctttgccaagaacaaagccatcctcaacctctactgcaacgatatttttgagacgggacagatttctccccgcatccgtttcaagacgcagaatgtgacgaatcattactcatgcttccgcgaattcggcgtatcgtttacctataaattcggaggatataaggagaagcaacgggaggcggtggatacgtcgcggttcaaataaaaagtaattattcgctgaatagttacaataaaaaaggtcgatgttaaatatgaataaaagggattacgatattttcgtaattccttttattcttagtatcattgttcattgttaatcaaaatcgataaaggatatgaactgcaggaaggtagtaagcgctgtatttctgttattagtaagcgtttgtatgcaggcgcaaggtacttgtgtcattgaaggaaaagtaaagaatgtgaagcaaggagtctgcctgaatctatttcggatggaaggagacgtgggaaacagtattgcaacagatacccttcagggagacagttttcgttttgaaatacctatctctaaaacagatacagaacgtttgagtttgatgattcgtgacggtaatctgtatagtatgggattgtccctttgggctaaggaaggttcccatatccgcttgacgggcgaggatatgaacatctacacctggcaggtggaaagtgaaatgccgcaacagaagatatggcagctttttgtaaacgattcacgggatttatggaaccataatcaggagaatagaatggagcacatgcgattgatgcgcaaatatccccggaaaccggatgataaggaggtgttggcaaaggtcgttgctctacgtgacagcttggagaaagtagaaaatgatttggatatccgcatagattccaatgttatagcccgcatgaagcagttgccgatagaggaggtatggatggataaactgaaaagtctggcgataggggtgaggtacaccaagggatatccctatcgcaaagaagtagaggagttatatgccagacttaccgatgaacagcgcgagacaccggaagctctggatatccgggcatatctatttcctgcccagacggttgctacccaagagcaagctgcggatggtgacttgtttgacttgcaaggaaacgtacaccgcttgtccgatttcaaggggaaagcggtgctgatagatttctggagccgtggttgcggtccttgcctcaaggctttgccggagatgaaggaaatcagccaaaagtataaagaccgtttggaggtagtaagtataagcattgatgacaaaacaaattgggagatagcttcgcgccatcatgccatcagttggtggaacttgaatgacttgaaaggcaatcacggattgtatgccaagtatagcgcaggctccattccccgctatgtgtttttatctccggagggagaggttgtagagatgtggtccggttacgggaaaggcagtttgttggagaaactgggaaaactgatggaatgataatcaaattattcccgttctctaatgaaactttcatacaatgcgacaggaccgtaatgccaatatttggtgttttccttttcaagcaattgaacagactgactttggagggtagcaataaatataggttattgtctgtaatttttctattcatagtatacctcctctgctttaatataattgagataggttagtgcctctattgtaacactccgtatctgtcaaacaactccattacctcccttccctgcatagagttcttctttttatactgctctatgcagaacgagatgaaataagtaacatccaattcagatttattcataagatgaaccatgtttttgtctcttgcaaatgtaataaaagtatttctaccttgatgtggtttgctacaaaaaatgtacttttgcaactttcaaaacattaaagttgttatttaaagaaaagactctgtatgaaatcggacattgaaatagcccgcagcatagagctgaagaagataaagcaggttgccgaaagtgtggatatcccgcgtgacgaggtagagaactatggacgatacatagccaagattcccactcatctgattgatgaagagaaggtgaagaaaagtaatctgatactggtgacggcaattactgcgacaaaggcgggtatcggtaaaacaaccgtatccatcggtctggcactgggactgaacaagataggcaaaaaggcaattgtcgctctgcgcgaaccctctttgggtccttgtttcggcatgaaaggcggtgctgccggcggaggatatgcccaggtgcttcccatggagaagataaacctgcactttacgggcgactttcacgccattacttcggcacacaacatgatttccgcattactcgacaattatttgtaccaacatcaggcggacggcttcggactgaaagaaatcatctggcggcgtgtactcgatgtaaacgaccgttccttgcgcagtattgtcaccggattgggtccgagcactaacggcattaccgaggagtcgggcttcgacattactccggcttctgaaattatggccattctttgcttggcaacagaccttgatgacctccgccgtcgcatcgagaacattatcttgggatttcgttttgatggtactccattcactgtgaaagagttaggagtagccggtgccattactgttctgctgaaagatgccatcaatcccaacttggtgcagactaccgaaggtactgccgcttttgttcatggaggaccgttcgcaaatattgcccatggttgcaactccattcttgccacaaaaatggccatgacattcggcgattatgtagtgacggaagccggcttcggggctgacctgggtgcggagaagttctacaacatcaagtgccgcaagagcggcctacaacccaagttgacgataatcgttgctaccgcacaaggattgaagatgcatggcggcgtcagtctggaccgcatcaaggaacccaatatggaaggactgaaagggggcttcggcaatctggacaagcatgtacgcaatttgcgttcattcggccagcaggtcatcgtggcattcaaccgttttgccagtgatacggacgaggaggtggaagctatccgccgccattgcgaagaaaagctcgaggtaggttttgccgtgaacaacgcctttgccaaaggaggagagggagccgttgaccttgccaatctggtagtagatactattgagaacaaaccatccgagccgctgaccttcacttacgaggagaacgattgcgtggaacgcaaaatcgaaaaggtagcctgcaacctctacggagcaagtgtagtgacttacagtctccattcccgcaaggttatcaaactgatagagcagatgggtatcagccattaccccgtctgtatcgccaagacgcagtactccttctctgccgatccgaagatatatggtgcggtcaataactttgaattccatatcaaggatattgtagtcaacaacggtgcggaaatgattgtagccatcgccggtgaaattcttcgtatgccgggattaccaaagaaaccacaagccgaacacattgatattgtggatggaaatatagaagggctgagctaaacgcgctccgcgcgtttagaattaaaaaacaagaataaaggctgcgcagttcaaagcgaacatcgcgcagcctttaattttaattcttaattgctgtttgcttatcaataagcaaacagaggatattctttcatctttgcattgacgcgtgcacgtacctctgcgatgacttgttcgttgtctacgttggacagaacggtttcaatcatctcggcaatttcgagcatcaggtcttccttggcaccacgggttgtgatggcaggagtacccaaacggatgccggaagtctggaaagccgagcggctgtcaaacggaaccatgtttttgtttacggtgatgtcggcagataccaacgctttctcggcaaccttaccggtcaaatcgggatatttgctgcgcaggtccaccagcatggagtggttgtccgtaccgccggaaacaatagtgaagccacggtccatcaaggcttgtgccaggacagcggcatttttcttcacctgcttggcatattctttccattccggttgcaggatttcgccgaaggcaacggctttggctgcgatgacatgttccagcggaccaccttggataccggggaatacggctgaatccagcaactgggacatcatcttgatttctcccttcggagttttcttgccccagggattggggaagtccttacccatcatgataacgccaccacgaggaccacgcagagtcttgtgagtagtagaggtcactatgtgggcgtatttcacggggttatccagttcaccggctgcaatcagtccggcaggatgagccatgtcaatcatcaggatggcacctatcttgtccgcgatttcgcgcatgcgcttgtagtcccattcgcgggaataagcagaaccgccgccgataatcattttgggtttctcgcgcagggcaacttcttccatctggtcatagtccacgcgtccggtttcccggttcagattgtattcgcagggagtatagataataccggaagtgttgaccagggagccatgggagaggtgaccaccgtgtgcaaggttcagtcccatgaatttgtcgcccgggttgagcacggcgaggaatacggctgcattagcttgtgcaccggagtgcggctgtacgttggcccattctgcgccgaagatttgtttcaggcggtcgatggcaatctgttcactctgatccactacctcacagccaccatagtaacgcttgccggggtatccttcagcatacttgttggtaaggcaggagcccattgcctgcataacttggtcacttacaaagttctctgatgcaatcagttcaatgcctttgagctgacgttggtgttctttttcgataagttcgaaaattaaatcatctcttttcattctgcttattagataagtttggtaaatctgtgttctcttattaagcgcacaaatttacgggaaataaatgaataaattgaaagaaaaggaagaaatttactgtcaaaagaacactccgaaagaaaaactcagcacattgtccctgcggtgaaaacggatttcgtttttcgtattttcgtctgcggcgttgttgtcggccggaatatcgtatgtcacacttttggagatgttgtgcagccccatgtcgtaacggaagtcgaaaaagacgcgtgagatggtgacggatacgccgaccgtgaagctgagattgagcggacgcagcctttcacggatattcacctggtcgaaattctcgaagtcgatgtcgcttttccggtcccatatatagcgcactttgggtccgccaaagacggcaaggctgtacggtccctccttgacgaagttgtatccgtagatgacggggatgtctatactgtggatggacgatgtaatggaggcttcctccggcagggctcctgatgcggcgttttcgggcagaggtttctcgaaggtgatgttgcaccggttgatgttgtaggatatttccggttgcagaaagtggcggtcgaagtttatccgcatgaaaagggaaccgaaatatcctatcttgtaattgttctgcacttcgtcgatgggcactccgttgacgctgaactgggacacaaggaacagggaagaggtgaaaccgcctttgaaaccgaaattgaccggagtttccttgcggtgtccggaatgctcttcatcggcagtaccgggcacaatcggagtctgtccccacatcatggtggggaaggccaacagatataagcccatcaggattcgtcgcagctccatctcttaaaacctttatcgcattattacttctttttctccaccgtccatccgaacttgcctatcttttcccccagctcataatatccgccgtgcacataaaccagcggattcgtttccgccagttccagtttgccggtttcagggttcagattacgggtatcggcacggacatttaccacatctgctataaacatgtcgtgcgaaccgagagccataatctcctttacccggcattctatgcaaagcggtgattcctcgataagaggcgcgctgactacggtgcttttcccgggtgtcagatgcatttcctcgaatttgttgtagtcctttccggagcgtacgccacaccagtccgtggcacgggccatgtctttcgtggtgaggttgatgacgaattccatattccgcttgatgatgtcgtaggagtggcgttcggggcgtacggagatgtagcacatgggcgggttcgtacaaatcgtccccgtccatgcgatagtcagaatgttatattcctccggagtgcttccgcagctcaccagtacggcgggcagcggataaatcatggttccgggtttccagtcttctttcatataatctcaatatcttctctggtctgctccttttcgcagtagtggcatttgatgacgcaattgtccttatccacgacatgaaacaacgtaggcataggctcattgttcgtgatgcacttcgggttggcgcatttcacgattccgcgcagttcgtcgggcaggcggacttcgcgtttctccaccacttcgtagtcgcggataatgttcagttttacattgggagccaccacggcgatacggtttatctcttcgtcgcagaagaacttgtcggcaatcttgataatgcctttcgtgcccagcttcttgctcttgaggttgaagccgatggtgatattgttgctcatgtgttccagtccgagcagggagactacggtaaacagtctctcggagggtatatggtctattacagtgccgttttccagagcagcaacctgcaattcctgtttcttttcgcttaacatcttgaaatattagttattagacgattctactgaattactcctttactctttttcacctcatccagtgtgatgcccagtacatcgcacagaatagcttcacgggcatacagtccgttttgtgcctgctggaaatagtatgccttgggattgtcgtccacatcataggctatttcgttgacacggggcagcggatgcagaatgcgcaggttgggacgggtatgttccagcatcttgttgcgcaggatgtagacattcttcacccgctcgtactccataaggtcggtgaagcgctcgcgctgcacacgggtcatgtagaggatgtcggcgtctgcgatgatttcttccgtaaagtccgtatgttccacgtacttgatgttgtgctcgcggcagtagattttgtattcttcgggcatccgcaactcgtcgggagcgatgaagtggaaagtggggttgaagtggcgcatggccatcagcagggagtggacggtacggccgtacttcaagtcgccgaccagaaaaatgttcaggttctccagtgtaccttgtgtcttgtagatggaatagagatcgagcatggtctgtgaggggtgctggttggcaccgtctcctgcattcacaatgggcacggtggtgacttcactggcatagcgtgcggctccttcgaggtggtggcgcatcacgatgatgtcggcatagttgctcaccatcttgatggtgtctttcagcgtctcgcccttggatgagctggtggcctttgggtcgctgaacccgatgacacgtgctccaagccggttggcggcagtctcgaaactgaggcgtgtacgggtggaaggctcgaaaaataaggtggcaactactttcccgtccaatatatgccgattgggatgggcttcaaattctttcgccatctcgagcatatagaggattttttcccggctatgctcggcaatggtgactaaacttctgttttccatatcgttgaattcatttatacttttcgagagtgtaaagttacggaaaatatgcgggctacggaaatatgcggggaagtttttttgcgaaatatgggctgtttttcaaaccgtgcggcatttgttttgcaaaatctacaaagggtatgaatcggcaacagcagcacttttttttgtagttgctgttgttagatatataattataggtataaatggcatctgcgttttatgtatcagtattgtattgcagctgtttaagtgcagaaaaactaaaaaaaacatcaatggaaatcctgtttcttaagcaaaaatcgcccaaaaacgagcaaaaacacgcatgaaaaacacgagttttctaatgtgaaatactgattatttgtcgaaaaagatacgggaaagcataggtgcgtttaatatatttccgtacctttgccctattattgaactttgattttagcaactgaaacatgataaggaaagtcgtcaaaatcctatggattttcatcgcactgatttcgctggtgtgtgtctttatattcttttccatagccaagggctggataggctatatgcctccggtggaagacctggaaaatccaaattacaaatttgccacagaagtcttttccgaggacggaaaagtattgggtacttattcctatagtaaggaaaaccgcgtgtttgtgggatacaatgatttgtcgcccaatatcattaacgccttgatagctacggaagatgtacgttttgccgaacattcgggcattgatgcctacgccctgacgcgtgccatagtgaagcgcggtatcctgatgcagaagaatgccggcggtggcagtaccatcacccagcagctttccaagcagctttattcccccagtgctgacaatgtgatggaacgtctgttccagaagcctatcgaatgggtgattgccgtaaagctggaacgttactatacaaaagaggaaatcctcaccatgtatctcaacaagttcgatttcctgaacaatgcggtaggcatcaagactgctgcctttacctacttcggttgcgaaccgaaagatttgaagattgaggaagcggctacgttggtgggcatgtgcaagaatccgtctctctataatccggtgcgctacaatgaacgttcccgcggacggcgcaatgtggtgctcgaccagatgcggaaagcgggatatattacggaagccgagcgcgactccctccaggcgttgcctctgaaactgaaatacaaccgtgtggaccacaaggaagggctggccacttatttccgcgaatacctgcgcggcgtgctcactgccaagaagcccgacaaggctgattaccgcggctggcaaatgcagaaatactacgaggattcactcgactgggagaacaacccgctctttggatggtgcgaaaagaataccaagaaagacggtaccaaatacaacctctacaccgacgggctgaaaatctataccacgctcgactcgcgtatgcagcagtatgccgaggatgccgtgacagagcatctgaaggaactgcaaggttacttcttcaaggaaaagaaaggagccaagaaagctccctacaccttccgtctgacccaggagcaggtggacgagattctgggacgtgccatgaggttgtccgaccgctaccgcctcatgaaaaaagccggagccaccgaagctgaaataaagaaagccttcgacaccccggaggagatgtccgtattcagttgggaaggggagaaagacaccattatgaccccgatggattccatccgttactacaagttcttcctgcgtgccggtttcatgtccatggacccgcgcaacggacacgtcaaggcatacgtaggcggaccgaactaccattacttccagtacgatatggccatggtgggacgccgccaggtaggttctaccatcaagcctttcctttatacactggctatggagaacggtttttctccctgcgacgaagtgcgccacgtggaatacacgctgattgatgaaaacggaaaaccgtggacgccgcgtaatgccaacaaaaagctgattggcgacatggtgaccgtgaagtgggggctggcaaactcggacaactggattacggcctatctcatgagcaagctgaacccctataacctgaaacgcttgatacatactttcggtgtccgcaaccgcgacatagtaccttccgtttcactctgtctgggcccgtgcgagatttccgtcggcgagatggtgagcgcctataccgctttccccaacaagggcatccgggtagctccgctgttcgtgacccgcatcgaggacaacgacggaaacgtgctggcaacctttgcccccgaaatgcaggaagtcatcagcgtatccagcgcttacaagatgctggtcatgctgcgtgccgttgtcaacgaaggtaccggaggccgtgtgcgccgtctgggtgtgaaagccgacatgggcggcaagaccggaacgacaaactacaatgccgacggctggtttatgggcttcacgccttcgctcgtgtctggttgctgggtgggcggtgaggaccgcgacatccacttcgatacgatgcttcacggacaaggtgcttccatggcattgcctatctggaccaaatacatggtgaaagtgctcggtgacaaatcgctgggatatgatgaaaatgaaacattccagttgcccgaaggctatgacccgtgcaaggatgatataaatctggaaggagacacccatatagaagaaccgatagagggactcgacgaactgtttaattagttgaaaggtgaaaattgaaagtggattatacgattagtattgggagcaacgagcagcggagggagaacatggaactggctcgcagacgcttgacggaactttttcccggaatacgtttctcggaagaggaggagacggcacctttgttctttcaccgtccgaatctgttctccaatcaggtggcatgcttcgcttccgataatccggcagaggaagtcactgcctgcctgaaagccatcgaacgggaagccggaaggaagcccgaggagaaggaacaggaaattgtacggctggatatagacttgttgtcttgtgacgggactgtctataagccaaaagatttgaaacgtgattatatcctgcgaggattgaaacaactgttataattaataaagaatataaggagatgtgtcgatagtatatgaacactttcggacaccccctcattttaaaagacgaagattgaaaatgaaatttttaggaatcatacctgcccgttacgcatctacgcgttttccggccaaaccattggcagtgttgggcggaaaaaccgtgatacagcgagtatacgagcaagtggcaggaatcttggacgatgcatacgtggctacggacgatgagcgtattgaagtcgcagtaaaagcattcggaggaaaggtggtaatgacttccaccgaacataaaagcggcaccgaccgctgtcaggaagcttgtacaaaaataggaggacagtttgatgtcgtggtgaatatccagggggatgagcctttcatccagccttcgcagttacaagccgtcaaagcatgtttcgacgatccggccacccagatagccactctggtgaaaccctttacggtagataatggtttcgaggcactggaaaatgtgaactctccgaaggttgtgctcaacaaaaacaggaatgccctctattttagccgttccatcattccctaccagcgcaatgcggcgaaggaagactggctgaagaaccatacgtattataagcatatcggcctttatgcctatcgcgtagaggtactgaaagagataaccgcccttccgcagtcatccctcgagattgccgaatcattggaacagcttcgttggctggaaaacggatataccatcaaggtaggtgtcacggatgtggaaactatcggcatagatactcctcaagatttggaacgggcagaagaatttcttaaaagccatgggctgtaaactagaaagcccatgctgaaccgaagtgaccaaccccggattcttgaaccggaacaactggtggtgcaaaggccggaacgtatcaagttgcctaatggcgtgccattgagcgtgctcaatgccggtgacaatgaagtgacacgtatcgatctcctcatggcaggcggccgatggcaacagaaacagcccttgcaggcgttgtttacgaaccgcatgcttcgcgagggcacccgacgctacgatgccgcccggatagcggaaaagctggactattatggagcctggctggaattgtccagtgcatccgagtatgcctatgtcaccctttattctctgaataaataccttccccaaacgcttgatgtattggaatctatcgtcaaagagccggtatttcccgagaaagagctgggagtgattgtagacaataatatccagcagtttcttgtcaactcttccaaggtggacttcctggcgcaccgcggattggtgaaggctctgtacggcgggcagcatcccggcggacgtctggtgcaggaagaggattatcagcgcatcactcctgctgtgctacgcgagttttatgaccgttattatcattctaataattgcagcatctacctctcgggcaaggtaaccgacgattgcatccgccggatagagtccttgtttggctgcgaggctttcggtacggatttccgcaaaccggagaagacagaattccatccggttaccgcttccggaaaacgtatcttcatcgaacgtccggatgccctgcaaagtgccgtccgtatgggcatgctttccctggaccgtaatcatccggactacttgaaggcccgcgtgctggtcacactgttcgggggctactttggcagtcgcctgatgtccaatatccgggaagataaaggatacacgtacggtatctccgcagccatcatgccctatccggggcagggagtgctggcggtcagtgccgaagccgccaacgaatttgtggagcctcttatcggtgaggtctatcatgaaatagaccgccttcagaacgagctggtttccgatggagagctttccatggtaaagaactatatgttgggagacatgtgccgtagttatgaatctgcattctcgctggcggatgcctggatttttgtgcaggtatcgggcttgcaggatacttactttgccgaagcattggatgctgtcaaggaagttaccccgcaagaaatccgtgaacttgcagggcgttatttatgcaaagagaaattaaaagaaatagtgtgcggcaaaaaaatgtcataaaaagcgggagttatcgcatcattttaccggataaatcctacctttgtcaattatcaactatcaattatcaactatcaattaatgaaatatctatatactgcactcattctggctttcttatgtcaaggcggagccattgcccaggaaaaaaaaggcggctttttcgataaagtgaaaagtacattctcttcggagataaagataggtacctacacgttcaaagacaacggggccgtctataccggtgaaataaaaggccgcaagcccaatggaaagggaaagaccgtttttaagaacggtgacgtctacgagggtgagtatgtgaagggcaagcgtgaaggctacggtacatatatgtttcccgacggtgaaaagtatgagggacaatggtttcaagaccagcagcatggcaggggtatctactattttatgaataacaaccgttatgacggcatgtggtttcaggattaccagcatgggaaaggaaccatgtattattacaatggtgatatttatgagggcgactgggtgaatgacaaacgcgaaggccagggaacgtatacctggaagaacggttccaagtatgtaggctcgtggaagaatgacaagaaagacggcaaaggaacattgacctggaatgacggttccaaatatgatggggaatggaaaaatgatgtccgggacggtaaaggaacttttgaatatgccaacggtgacaaatacgtaggtgactggaaggacgacatgcagcatggcaaaggtatttactttttccataccggcgaccgttacgaaggttcttatgttcaaggtgagcgtaccggagagggcatttactaccatgccagcggcaacaagtatgtgggcagtttcaaggacggaaagcaggaaggccacggcacatttacgtgggcaagcggcgccgtttacgagggtaattggaaagacaaccaacgtgacggatacggtacttacaaatggaatgtaggtgactcttacgaaggtgaatggaaagacaataagttcaacggccagggtaccctgattcagaccgatggaaccaaatataaaggcggttttgtgaacggtatggaagaagggagcggcatccaggaagacaagaacggaaatcgttatgaaggctttttcaaacaaggaaagaaacacggcccgtttgtggaaacggacaagaacgggaaagtgatacggaagggaacgtacaaaatgggaaggttggaaaattaaagaaatagaattaaaaattaaaggctgcgcaatattcgtctgaactgcgcagcctttaattttttattatttaattatctaaactcgtgtttagataatgtattgtgaactgattgattcattgttcatcacccgcttgatggtttcggcgaacatatcggcaatgctcaactgtttaaccttgtcacattttttagagtaggggatactatcggtaaataccatctccgtcagtgcagattcttgtacacggaaagaagccgggtcggacattacgcagtggctggcaatggcacggacagatttggctccggcttccaacatgatgttggcagccttggtaatggttcctgctgtatctacaatatcatctaccaatactacattcttgtcttttacatcaccgatgatttgcatggtggcaaccacgtttgctttttcacgtgtcttgttgcacagcaccaggggtacaccgagatatttggagaatgtactggcacgctttgaaccgccgacatccggggtagcgattaccaagtcttccagcttcaaggattcaatataggggaggaacactgctgatgcatacaaatgatccaccggaatgttgaagaaaccctgaatctggtctgcatgaaggtccatcgtaatcaaacggtcgatgcctgcaacagaaagcaggtcggccaccagcttggcgccgatggaaacacggggtttgtcttttctgtcctgacgtgcccaaccgaaataggggataacggctacaacgctttttgccgatgctcttttagcggcatcgatcatcagcagaagttccatcagattgtcagaattagggaaggttgattgaaccaggaatacatgcgagccacggatagattcctcataagagactgcaaactcaccatccgcaaaatgggtgatgttcatctttcccagagggcaatcaaggctagcgcagattttctctgcaaggtatctcgaatttgttccagagaataccataaagggtgctttttcgctcatttgtgtaatagatgttacctatttgttaatttgcatgcaaaggtatgaatttcccgttacataaaacaagagttattgtataaaaattatttttctttctcggatttattcgtagctttgctttatgaaacgactttcttccatatgctttgcgggattgctgtgcctttgtacagcaatggtttcgtgtgtaggaacggcacccatgaaggaagtgcgccttatcgactctctaaaccaggtggcttatgcttatcgttataaaaacctggattcatcctgctatgcggcatcaagggcctaccgtgaagtcagcctctataaacaaggaaaagcggaagcatccaataatctgggcttttgtgcttttatgcgtatggattttgagcaggccgaaaaatttcatatggatgtctataatctgaccaagaatgagctggaactctttattgccgacatcggcttgatgaaaatttatcagcggacggcgttgaacaaggagttctacgattatcgcaacagtgccttgcgccgtatgaaaaggatagcggaggatgacaatctgtttgtggaccgacacgagcaaatacgtttgaattatgcccgttccgaattttatatcgtatctgctgtttattattattatctgcaacaacgtcccgaggcagtggcttctatcaatgaagtaactgataatcaaaaattgttggcagataccaaccagttattgtactatcattacattaagggatccgctgccttgtgtgaaggcgagacgccggacgaacaaaggctgcgagagtttgacgaactatataccacgtggcggttggcatcccgtaaagggtatctctactttgaagggaacggagtgcaggggcttgccaacctgatggcctcaccggagaattacgagtttttccaggaccgccgttcccatgccctgacacggtttggagtatcggtagactctctattgccaatgcgtctagggcagttggctctgcagaagttcagtcaatataaagatttgtatcagatagcaggcgcatatgtgtccattggcaaatacctgaatgcccacagtcactatacagaagctcttgacacgttaaaacttgctctggaatgtgtaaatgaccatcaccgccttttctatgactgccacgatagtttggactggctgaaagcatttgaccgtcgagatacgatttgcgcggagaaggcatggatggagcagaaactgaaaaccgtacctgagtggatttcacgtattcgtgaacagttgagcgtttcgtatgcaggactcgggatgaaagaaaaatcagactataaccgcaatatttgcctggatatccttgaagatacacgccaggataaagagctggaaagccgctatcaggcattggaaaaggaggcgggacagctcaacgttgtgttgtcactggtcattgtgggcttcgtgcttgtatcgctctttttctggtttttcaacaagcgttccaaagaccggaacagagtacatctccaccgtctgcaactgatgctggacatctgtcagaagataacggcatccattccggcagatgcacagactgaggaggaaatcatcgactctatccggacggctgtctgcccggaattggaaaagctgtttggagtgaaggacatccgcatagacaacgggcaattagtgttcccgcgtcggatgagcaaggatgagcaggcgatggtacgggtgataactccctatatccaatgggcgatagacaacggcatgacgtccatctcccttggcgacgaacgccgcagactggaaaagcaacgctacatttacgagcagcacatcgcagggaacaaacggcaaaatctgataaagaaagcatgtatggctattgttaacggaattcacccgtacatagaccgtatcatcaacgaagtacagaaactgactcaaaaaggattcatcaaagaggagcggataaaggaggagaaataccagtatatcgacgagttggttactaccatcaacgaatacaatgatattcttgccctttggataaagatgaagcaaggaagccttagcctaaacatagagacgttcgaattgaatgaacttttcgagctgctcaggaaaggaagccgtacattcgagatgaagagacagtcgttggaggtgcagcctacggatatcagggtaaaggcagacaaggcccttacattgtttatgataaatacactggcggagaatgcccgtaaatatacccctcagggcggtatggtgaaagtatatgcacggcaggaggaggattatgtggaaatctcggtagaggataatggttgtggattgtcaccggaagatgtagcccgcatcgtgggagaaaaagtatatgactcaaaagccatcggtatgagtgacgctcccgacaaggaggaattgaggaagaacaaaggaagtggctttggactgatgaactgtaagggcatcattgaaaaatatcgcaagacgaatgatttgttcaaggtctgtctgtttaatgtggagagcgggctgggaaaaggcagccgtttttatttccgtctgcctgccggtatccgtaagtccgtgtcggtgttgctcgttgtgttgtctttgtgcatgtcatcctgccggcatgctgtggaacagcctgcttccggagaggtgttaccggattctttggcactgcttgcacagaatgaatacgaagctttgctggacgaagcctccgattatgccaatgaagcttattactgcaatgtagacggagaatacgaactggctttacaatacatagattcggcaatgtattgcctgaacgaacattacaagcaatacgcccatcctatacatcgctatatgacgctgacgggagacggggcgcctgcggaactggattggtggaaccagatgttcaattcggatttccatgtaattctggatatcaggaatgaagcggcagtctcatttcttgcattgaagcaatgggatgactatagttataataatgctgcctacactaccttatacaaactgttgggagaagaccaatccttggaagaatattgccggcagctggagcgttccaccaacaacaagatggtgggcattttgctggcggtgattttgctgttcgtattgctgttgggatattacatactctacttccgtaaacgtctggtgaaccgctggaatctggagcaagtactggaaattaatggaaaggtgttcaatgcctccttgttgccggtttcggatacggaggaaatgttgcagcgtgaggaggatacattgaaggaaatcccgcggcagattgtaggttccgcttttgatgcagtgaacgaacttttgagtatcgaccggttaagcatagctgtatacaacgagactacacataagctggaatatacttccaatccagtggaagataccgccgtggacgagttgcctatctggaggaaatatatggagaattgctttgagcagcaagtgtacatatcggaaaagggtatacaagcattgccgcttgttgtggatgcgggaaatatgtgtcgttgcataggtgtgctgtgtctggaacgcagggaaggtacggagcaggagaccgaccatttgcttttggaactgatagcccgttatgtctccattgtaatcttcaatgcagtggttaagttggctacgaaataccgggacatcgaagtggctcaagatgaagcccggcgagcttcctgggaagacagtttgctgcatgtacagaacatggtgctggataattgtctctcgaccatcaagcatgaaacgatttattatccgaacaagataaagcagctgatagggaaactgcggtccggcaaacagacagaagcggaggagcgggaaacggtggttgccatcagcgaattgatagagtattacaaaggtatctttacgacactcagttcatgcgcttcccgccagttggaagaggtgactttcaggcgtgcgacaatatctgtgccggaacttatggctactgccgggaaatatttccgcaaagtgtataagggaaacaaggcgcatattgattttaagatacaaccgttggaaggacggattaccggcgactggaaccagttgcgtttcctgcttgaaaacctgatagacgaggcttgctccgtaactctggatggagctgtctgtctgtcggcccgggaagatggggaatttatacgttttctgtttacagatatgcgtagggaaaagacccgtgaagaattgaaccaattgttctatcccgacttgtctcgcatgacggccggtgagaaaggagaactgtatggtacggaatatctggtgtgcaagcagattatccgcgaccatgacgagtttgccggacaccggggatgccgtatcaatgccgaaccgggaaaggaaggaggttttacaatatattttacgctaccgaaaaaatgaaatatggaagacaaaaaatttaaagtaatcatcgttgaggatgtcaagttggagctgaaagggacggaagagattttccgccatgaaattcccaatgcggaggtaataggtactgctatgactgagcaggagttctggacattgattgaagccggcgtgccggatcttgttctgctagacttaggattaggaggttcgaccacaatcggggtggacatctgccggaatatcttcaagcgttatccgggagtacatgtgctgatattcacgggagaaatattgaatgagaagttatgggtggacgtacttgaagccggtgccgacggcattatcctgaaaaccggagagttactgaccaaaaccgatgtgcaggcagtgatggacggcaagaagctggtctttaactatccgatactggagaaaatagtggaacgcttcaagaaatctgtcctgaatgatacaaaacgtcaggaagcaatcataagctatgatattgatgagtatgacgagcgtttcctccgtcatttggcactgggctataccaaagaaatgattgccaatcttaggggaatgccttttggagtcaagtcgctggagaaacgacagaatgacttgattggccgtcttttcccgcctagtgaacgggtgggggtgaatgccactcgtctggtggtgcgtgcattggaactccgaattctgaatatagacaatctggaagccgacgatgagtaaactccggatgccacatcccgctacgatgttcttcctgctgacgctggcagtcatcctcctttcatggatattcgatgtctatggcctgagcgtgctgcaaccgcagactggagaagaaatacgggtgcagagcctgctgagtccggagggcatacgctggctgctgcgccatgtcataaccaattttacgggattcgctccgttagggctggtgattgtggctatgttcggaataggggtggcacagcattcgggtttcatcgatgcatgtattcgcaggggggtacgacgtccacgtgatccttggcgcattatcctgctggtcattgtcttaggactgttgtccaatatagtgggagatgcaggatatatcattctgttgccgatagctgcgactttgttccagtccgtcggtctgcaccccattggaggtataattacagcttatgtttcagtctcttgtggctatagcgctaatgtgtttttgagtacattagaccccatgattgcctctgtaacgcaagaagcggctgataggatgaatattgctccggggcagactggaccgctgtgcaattattattttctctttgtttccacgttcctgcttgcatttatcatttatcatattacccgcaggagcttgttgccgcacttgggaatgtatgcaggggatattcattttaatggctacaaacaactgtcccgcaaggaacggagagctatgttgggagctgtatttgcaggcttgctgtatattgccattattctgtgggctacattctcttcatgggggatattgcggagtgtcaatggtgggttgattcgttctccgtttatagtcggtattctgtttttgctttcgtttggaataggtttgatggggatggtctatggttttgcctccggccgataccgtacggacggtgatgtgatagaagggcttacgcagccgatgaaactgctgggcgtttattttgtgatagctttctttgcctcacagatgtttgcttgttttgaatattcccacttagacaagtgcattgccattttaggcgccaatctgttatcttccgcttctttgagcagcttatggatattgattctcttcattctttttacggcgctggtcaatctctttatggtatctgccacagctaaatgggcttttatgtctttcatttttgttccggtactggcaagtatgggcatttcgccggatatgacccaatgtgcgttccgtataggtgacagtgcaacaaatgccataacaccttttatattctacatgccacttgttttgacctatatgcagcaatatgataggcaatccacttatggttcactgctgaagtatacttggagatattctttagtcattctgttggcatggaccgccttatttgtactttggtacatcagcggtttgccattaggactgtaatgtcataaccaatgaacaacccgctttcgataaccccggtaatggctttcagtttctgttccaaatcaggaacaatgttgctgagatgaatgtcaagaatgaaattaccgttttcggtaaataccgggccgtcttttccttctgcaaggcgtaggctgatttttgaagctcccaataagcgtatctcgttttccacatgggagagagcatgtggaaacacttccaccggtatggggtatttgctccccagtttgctgacaagcttactctcatcgataatgatgtaagtcttgccactgcttttaatgaggagtttctccttaaacatggctccgccacgtcctttgatgaggttgttctgcggatccacttcgtctgcaccgtcgaatgtccaatccggacgcttattccacagagtagtttgcggcaggccaagctgtatacatgccatcgaaatttcggcagatgccggaatgatttctatatgcaaagattcttgtttaactcgctaagctaatgcaaacaaagtgagataaacggtagagccggagcctgctcctatggcatcactgtctttggccagtccggcaatttcctgggctgccaattccttattcgctttattgctgattttatttgaccattgcaattcttgtatcaactgattttcccattccatcactttaaagtttagttgttattactctttcattcattttcgggtcaatgctactttccctgcttgaatattcatccatatttttactttttataattagtaacattgataatttgcaaaatgttttaatacatctgtatataaataccgtgtatcttgtttgtaaaggtaactaatcattactttttatatagcaaatgagccttttgtacataggtaacgaaaaaaggtggtacaaaaatttgcaatattcgcaaaaaagcgtacctttgcaccgcaattaaggctggttccgtagctcagctggatagagcaacgcccttctaaggcgtgggtcttgcgttcgaatcgcaacggaatcacaacgaaaaaccgcaaatagctaataaaaagcttttgcggttttcttgttttagaattagaaaatgtccgcataggttgtaatgggaaacaaattggagtatttggtttacattgcaggcaagatttatttgcgatacctggagaaaaaattatcaatccaacggactagatatactataataactccggctatgaccatactgataatacgtaccaacataatttatagaattaaagatttgtttttatagaataataatgtgcaaagataattgattggtggagaaacaaaaactctggaaaggatataaagataggagttaacgcatattttcacggatataatcctctattgtaaaatcactcttatatctagatatttccggattcttctctacagtcgtaatgcaacgtttttctttaccaagtaccaaccggtttaggaagctcaggatgtcacgacgattatccttcataggagaataggatagggaatgtcctataccttccgctatatagaaatagtatgctgtctctttttctttcagttgcatacagataaagtttgagccccatagccccatttcctcttctattactgccttagtaaaaggaaccgtgctgtcggcatcaccatagaacaacataagaggacaaggggacattatccattttggaataccattggcacagattgctccagaaaaggaaatgacccctgcataattgaaattggcaggtaatctgtccgcaaaggccgtttgattgcaaatctcatactctgcttgaagggcagttatcgcacctgcacttgaaccgcaagctataatttgtgcaggatttatttgccattctacactatgctcaattatatgatttgtagcatcaccaaaatcttctacagcacaagtgattgcttgttgcagggcagaagagaatccttgcaagtccgaatactccgatttatctatatcctttaattgggtgcggtaatctgttgatactaccacataaccggctcgtgcaaaaaaatgaacccaattatatactttaatgtactaattttaattctatctatttatatcttatttcaataagggaaatcttttgggtttccctattttttatgcccattttcaagtgaatcaaagaattttgttaaagaatcctaagtagataacacttgagattggatttgggtataattcgccaaagtagttttcatggtagtaaaaaccaagtgttccaagtatcgtactggaagcacttggttaatgtttaaatgagcaatattaatttgtccttaaataaaggtcaaatgcccaagttgaattgaagtatttgaccataaagataaatgtttcataataattgttatatcaaccttgatttgtaagggcactctgatatataattttgatagttcataaaaggactatcaaaaagtatatgagaaataaaactatactaattattaaactattagagatagtcctaatagttttaggaatgttccatgaaatacttgaaatattggaacatcttaatgccctgtaatatacaggagatatgtaacaagaacccgactctgcaaaatcgggtttattttttatgtaacattttatctttaaatatgtatatgataattatactcaattgttttatttaagtgcctaatttttagatacttatttttatatgttatgattttttattatatttatataataaaaataacatgtcaattggaaacagaaataatcaatattgtagaaataataaagaagaataaacaaatgcgagaagtaaagtcatttattgatttgatgaaatccttttatggtgaaaaatcatgtagagaatttcttgaagatattaaatggcatggagaaccgatttgcccacactgtaattgtcaaacgaaagagcattataagttaaagtctaatggagaatttaaaggactatataaatgtaaacgatgtaagaaaagatttacggttactattggtactatgtttgaaggtagtcatgtatcattaaagaaatggttctatgcattgtatatattcttagtccataagaaaggaataagtagcatacaattatctaaagatatagatgtaacacagaaaacagcttggtttatgttggaacggataagacattatttgaaagacaagcttgtagttcaatttaatgatatgacacaagttgattaaacctatgtaggtggtaagaataaaggtagagtaaagaatgcacaaggaagaagccttaaagttaagactcccgtagtaggtctattatctaatggaatggcatatacagccgttgttccaaatactggtggaaaggttttgaaaacgataatcaatactttagtcaaggaaggttctaccgttataacagatggatggaaaggttatactggaatatcgaaaaattatattcataaagtagttgaacatagtactggcgaatatgtaaaagacggattccataccaatagtattgagggattttggtcacacttgaaacgtggaatattaggaatatatcataaggtaagtccaaagcatttggataaatactgtgatgaatttgcatttagatataatacgagaggactaacagatgttcaaagatttatttattttacgatgtcagcctataaaagattaaagtatcaaagtttgatttacccataagaatgggtaaatttgaattgaaaatagaaaaagagcagttcacgaagtagcatttttgctaaatagttcctatatttgcattgtcccaagtggacagacatagtttaggaagcgtttagcttattccttgttaatgaatctggacaattcacctgcactgaggaatatgaaagaatgctccctttggtttgcatatatagcactgatgtgttgatatacagccaaaggcgtgagctgttttcatttttcggtgcagaggtagtccagaacccattgacggaatttgataacagtcttgcgccttccctattttagaaaatgctttctttgagactgggggagcgcaaagtgattgtgtatgagaacagtcttctgcaatgattgtcatttgtcggatgatattccaaaattagttgctgatgaattgttgggtattcagcaattagatatgttaaaggctcgttataagcaaatgagaaagtgctatgacttctcgtatgcagaatggcaaaaagagttttccgatgatttgaagccttttaatggatatacagatactacctctgtttgtattcccattttgaatccattgtttagaaaagattttgcggataaaggtgcaataggtttggatttgccgacttggtttaatgttcaagtcgataatgtccgaattatgcttattgcgcaagacccgttacgtgatgcaaaatggtatgaagaatgccatgatgcaatagtgtcaagtccatttgggttacatgatgcaacccataggaaaagtggaagtggaggtaaaatggccgacttgttgattaatggtctgattaagaaaaggtttgcaatatacttgactgatgcgaataagtattttgtacatgatagagaaatgtctaagacttttgctgaaaatagattaaagacatatactgatatattgcaaaaagaattagacttagtgagaccaaatctttgtgtttgtttaggtaagaaagcgaaagaagttttggataaatgtatggtaaatgtcaaatcaataatgttgccgcatttgtcgggaactgcacgaggtgcaatagtcaaaaggtttccaatattagaagacattaaagcaacagccgaaaatgttgcaaatgtatatgtagatgaaattgttgaatcattaaaatagtagaattatgggttgtataacattcgtattgttagtattgaatatcattgcattagttgcaatagatattatgttttgggctgaaagtgcagcttcgggacttgctggagtatttggtattatagcattctttataggatatgctttgagtgtggaagtaacgattgctccaagagatttttgggtaaattctgcatttggcatctttataaagaaacttggtgtagccaatatgacagcttttgcagtgtggtttatcggaaatttgataattgggtagaaacattaaaatgagaagatatgaacaataatgaaaattcagttttagagtatttgaaagcaaacaatgaagtactgtttgataaaatcgtgaatgctttgcgtaaaggaaagcaagttaattttacggatattaatcaaagtgatattatcattttgagtccgcagaaagcatttgaatatgcgggagaagaaggcgataagtattttaaagtttggatggtagggagtactattgcttggtgtacttgggctaattcaatggttgatagcgatttccgttggaatgctaaggcgagaaatgaaaacaaaagagataataaggacattttgggtaatgagccttatatttctgcctatttgaagtctaattctgccattgaacaatgttcagtagtttatatgttcccgtttgaagccttttccaaaaagaaagtagaagttgtgaagaaggtggaagaaaagtaagtattcggccaactacaggtattaaacctttatatacaacaatagcgactgtcactatgaacctaatagtatcagccgctattgttttgttgaacccatatgttacaatttatatcagttacaagattcctccttttgccttgtcagtacacattccggatgtttcaacttccatttatgtggaagtagattcaaaagttcttcttgggttgcctttttgtgataaggcatttgtgcgataacatcgttcaggtataccctgggatttaccccgtgcgccttacatgtggccagcagagaacatatgacagacatattaaccgcagcttcgtgattaccacagaaaagaaaattttttctgctcagagtgatgggccgttggacattttccgccagattgttgtcccagtacaggcggccatcgtccagacatctcataatattatcccatttggtataggcatatgttatggccttgcctgtcaaagaacttggactgtatttaattccttctgtctccatccataccttcattgcctccatgattggcctggacagttcctgacgcgtctgtctgcgctcatcatatgacaggccggcttcgtcacactggcgttctattttatagacatgctgtatctgagtcagtgcatgttgcgccatctccctgttttcatccaaagcctgctcaaaatgacggcgtatatgcaccaggcagttgagtagccgcacgtcggggttggtcttgaaggctgtttcataacctgcaaaaccgtcacattgaagatatcccttgaagttatattgatttgccagggattcgatgaccgctccggcccgtgatcccccgtcgtaatggaagatgaccagtttctccatgactgatcttaccatccagagatattccttgtcggctctgtgtttttctctgttaatgaccggaactgtagtttcatccgcctgtacatagtcacaggagaagacttcccatttgagttcttcatacagaggcttaagcagttccacggttttcttgaaccagccgtccagtgtactttcggtaaggcctttcattccaagatggcggtattgctgtatctgacggtagaacgggacatgatattcatacttctgaagcagtatctcggtaagcaggctggtgtcagcaatgcacttgtcgaccggcatcagcggcatgggagctatctctacgcctttctgtccggctggaggaagcagggtactatccttgagagcatatttgggacggatgatcaccttgacgtaaagcattcccggcttgtgtttgacgacttttgttatctcttcgcctattctacggtataaagacaagtctacgcctttcggttctattgtatcggtttccaatacgggcaagtcctctatcattttgcggttctgacgatttcgttttacgtcttccaccgattccttctcaatcttttccacagcctcgtcccgcttttcttccgcctgctgccggagtccggaaaactcgtcggcaaagaggtctggcatattaggatcatatacgcgaagtttctctgatttacgaccaaagagctgacggttcagccatgcgacctgagccgtcaactccttgatacgttcctgcagattttttatctgttcggattgattcttattagtagtagacaatgaggctatagaggcattcagcccttctatcgtcttgagtaaaatttctttttcttccattgtctatacttcttttaatgatgtaaatatactaattaacagtgaattatgcaacaatatccaaagtttactcacgcaaaaaacatgttatacatggtattccttacgttcggctcttaaccgccggagcctctgttccgggttttcctgtattccttcaaccatcatcaccagatcgcgccactccatgggatagctgtttgatttgggatcatactccggcagcttgaagcgaccggcctccaaacgttttacatacattaccatacctccgtcttcggcatgaaggagtttcattagtctgcggctggaaccgatgaagatgaagacatcaccgttcctcacttcactgttcattttctcatgtaccactccgcatagcgaactgatacccttgcgcatatctgtcctgccaggacacaggaagtagcgcatcgtgtcgttcaggttaaacatgaccgtctcgaagactttgggtaaatatttccttcagcaaatcttcagaaccgctcccgaagtgggcacgaagtccattgggaaacagcagcgcaacaccatgcggcaattgttcttcttgggaagactccgtaaatgcctgtttaaaactgataggagccaactcgtgtttgatactgctcctgtcaacggaacattttctacgccagtagtgataggttgaataacttacacctatctgttgaaggtacgacttcaacggcagctcgctttgttgcacctgcaattctaattcttcaaattcttgtctgttcataataattgaggtttgattgtattcactgccgcaaagctacaaccaaacctcaaagtgtaaaaggtgcatttcttcgaatgcttacgaagaaaaagaaagtaaaacagaaaagtctgtaaaaaagacgacaagtgaaccaaatagtaaaaaggttgaagatattattgatagcctttcatggctaactgaatgtatttctaagaaatttgcaccaagtcccacaatgcccggatttggtatgattacaagagcttgggataagcagcaacttattggggaacgtgctgaatttgatactaaattgatgaggttgaaatgtttggatgagcataataagatgataccgtattttgagaagaaagcacaagagtgggatgagaaaaaagctggagtgtttgaaaagatagcgaaagtgttaaaaaaataataagtagtataacagtaaaagccaaccgacttataattaagtggttggcttttgattttagaaaacatccataaagatggattgttttctggtggtcttttattgcgatttttggtcgtttaatttagtttctctatatttgtattgaaaattaatgctttagattttttagacgaatgatagagcattaagagtattaacaaatctaaaagaataccattatggacgatttaaatcgtttaaagaccttattggaaaaagtatttagtaagtgtttaaagcaggtgtattattacatttatatgcctgattttagaggagacatgcaagtcttgatgaaagaaagaccatgtacttctaatatgatacgtaattctttaaaggaaatggatatacctgttaaagaattaggtaataatggaatatgtatttttatagcttaattgaaaatttgcaattaagaatagccgcacctaagtttgaatttgggtgcggcttttatttttgtgtgattggtgcattaaagtatataattgggaaaatgaaaataagaaatgtaatcgggattatctcttctcccgcctttgaaacctcccccaaatgcaaaaagaatgacgggctttgattgtgtcccttgtatttgatcaatcattacatacttgtccagtttcagagtatcagcctttttgatggcaaaagtataggtttgcttgtcaatatgttgtgcatgcacaacagtagctatactcaataatgagcatgccatcaagataaaaataaagcgttttcccatattcagtttattctattaatgttgcgtggattatctgacctacaaagatagaataaaactataactaaaaaggggaaagatgacatttagacataaaaaaaggctatctatcccagacagccaatcttttttattaaccttaaatctaatactatgaaaaacacagtacaaagatacgtacttgcaggagatatccaaattttagtgggtaatcagtggatattataacatggtttagtagaatattatttctgttaaccattaacataaataatgttcgatttaacaaaagcaagaattaatattcctcaccaatgattgcaaactttaatcatatcgacggtaaatccaccattggcggatataaattttccttttcttttaagaaattctataagggtatctacatccatattgtcggcagagcaagtgaagaaacgctgccgctctccgaatttttggataatggcttctctcaatgataactcagtataactattaccttccatcatgtggaagatttcatgtgcatgtaattgttccataatcttttttgttgcaaagataatatgatattcaaagtataagtgtaacatatgtgacaaagccccaaaaacacatccagatatttgcttttacgtaaaataacacttgttacgactatactaaaaacctcaaaaaaagtaaaaaggttttgcttctataccattgtaaactaactttgggaatcaacttttaaatgaattaaagcatatgaaaaaattaatcttatctattgcactatgttgtgcagctacgaatttctttgcgcagaatgctgaccctgcccagttggtcaacgatggtaaggctgctcttgaagctaagaattaccaggaagcttacacaaaatttagtacttatctaacacaaacaaacaaccaagactccgtaattgcatataactgtggcgtttgtgccgataagataaagaaacctgccgaagctttgaagtattttgatattgctgtacagaaaaagtacaacttggcaaatgcttatataggtaaagccggtgctttgaaagatttgaagaaaaatgatgagtatgttgccactttaaaggaagggctggaagcaaatcccggtaacaaaacattgactaaattgtatgctacttattacgtaaatcaaggtatcatggcgcagaaagccaaaaagatggatgcagccgaagaagcttttaaacaagccatagctatccaagcagataatgtaaatgcacttaacagtctgggttctttgtattatagtaagggtgccaataccatgaaaacagatgtagaaaaagcaaaagttgaattcaaggaagccaaagaatatttggataaacttattccattgctctctgcaaacaaaccagctcaaaagaagatgatggataatgcaaaaacgatgttgaacttcatcgacagtcaattgaaataaaagactctcctatataaaaaagaggcagatatcaattcagatatctgcctcttttttaatgttataaaatgattatttagttcttctcagtacaacagctgtacgtgccggtatgtaaagcttcagccactccttcttgtcttttttataaagcggatcgtggatggtaaaatgtttgatggtatcatccgttaaaccattaccgccataatctggattatcagtattcaaaataacttcataagttccggcaggaaccaagaaaccataatcagtaaaagactgcttggggttgaagttgaatacaaaaatcaagtccttgcgcatataggccaatacctggtcaccgtcattatgccatatttcttggaccggagtagcttggaagttctttatgctttttacaactcccaacatggcagcatcaaagtcacccatataatgatatgccagattcttgttgtccaccaaatcccattgacggcgggcatatttacatgaccaaccgttaccttcacgggggaagtcaatccattccggatgtccgaattcattgcccataaagttaagataaccgccgttgatagtagtcgcagtcagtaaacgtatcattttatggagagaaatgccgcgatttacggtatagttttcgtctcctttctgcatgtgccagtacatatccgcatcaatcaagcggaaaatgatggttttgtcacccaccaaagcttggtcatggctttccgcataggagatggtcttttcatctttgcggcggttggtcacttcccagaacatgctggatggcttccagtcctcatctattttctccttgattgtcttaatccaataatcgggaatattcatggccatacggtaatcaaatccgtagccgccatcttcatattttgccgccagtccgggcattcccgatacttcttcggcaatagtaatggctttggcattgacttgatggataagcctgttggcaagtgtcagataacaaatggcattgtcgtcttgatgtccgttgaagtaatctccgtaattacagaatgcttctcccaaaccatggctataatatagcatggaagtcactccgtcaaagcggaagccgtcgaaatgatattcttccaaccaaaatttacagttagaaagcaggaaatgaataacttcgttcttgccgtaatcaaagcaaagtgaatcccaagccgggtgttcccgacgtccaccgggatagaaatattgattaggatcaccggcaaagttacccaagccttccacttcatttttcacagcgtgtgaatggacaatatccatgataaccgcaatccccatgctatgggctgtatcaatcagttctttcagttcttccggagtaccaaagcgggaagaagcggcaaagaaactggaaacatggtatccgaagctaccataatagggatgttcctggatagccataatctgtatgcagttgtagccttcttgggcgatacgtggaagaatcttttcttgaaattccttatagctaccgaccttttcctcctgctgagacataccgatatggcattcatatatcaacaaaggatctgtagacggcttgaaaacccgcttcttcattttatagggtttctccggaacccaaacttgggcactgaatattttagtctgttcgtcttgtacgacacgtgtagcccatgcaggaatgcgctcaccgcaaccgccgtcccaatgtaccatcagcttgtacaagtcaccgtgtttcacagcatcagcaggaagcttgatttcccaattgccgtttgccttgcgtttcaggctgtatttcttttcttccttccaaccgttaaaagttccgactataaagatttgggttgcgttaggcgcccattcgcggaaaacccagccgtcgtcagtacgatgcagaccgaaatagaggtatccggatgcgaaatcagataaggttaattttcctttattggtcagttctagttctttgtctatggcatgttgatgacgtccgttgatggcatcggcaaaaggttccagccatgggtcattcttgattaaattcaatgtttccatatagaggatgagttttggatatttgataaatttacgctttaactttcacaattactttttttacaccgtcaggagtaatacccggagcatgcccgtcccgagggaaaaagatagcaaacattccgggcttcactgcaatatagctctctgccagtccttcaaaaaaagtgatgtctttttccgcattgtaaggagcatcaaccggaaggcagtcttgggcggcggtataacctattatctccgtaccggacaaaggtatttgaatgtcaatatagtctttatgagtttccagtttggcattctctttttcttttggatttgtctgagccacattgaccaacaagtcctttcctttcagttcggtcttgccgatttccaaagagtgcaaatcatgtgattttaaaaaatcaatggcctgctcaaacagaggatgcagcaaagtatatttttctatgttttcaagtctgtctacaaccataattcaaatgttttaagttagttatataggtaaattattcaaagtcgtctatggtgtaattcacaaaatcagaaaaacgcttcatctgcttgaagatgtcgtctgtacgatccaaaaagtctggagcaagaaagaagctgtccggctggcagcaggcaaccgtatactctttacactgaaggtatttcagatagggatagtcctttggaaatccttttggagctgtttttagaaaattctctccgatgatggggaagtattgcttgaaagcgggatcttccactatgctacgaaattcatccatattatcgtatactgcttgtcgcagagctcttaacaagggcgagggaggacaataacttccaccggccaacaggcagtttcccggttccagatgcacgtaatagccacaatggtcggatttctttcctttcgcattgatatatcctcccagatgtgtcttgtagggagttttatcttcggaaaagcgtgtatcacgataaatacggtatgtacagtcctttgcttctatgccacggatgctttcatcaaacaaagagatacgggagataattactgtaagcaagttttcaaactcgctgcgggctacttcatactgttcccggtgagaattgaaccattcacgattgttgtttgcagacagttctttcaaaaattgaaatataacagggatattcatatcatattctttccttattatctgccaaatttacggataatatttctaacatgctacaaagaagggtaaaaaaagcatcggctctggtaaaccgatgctccttacacatttatcaatcaaacagacgcttctgtttttgatgtacttacttatcacaagcgggtacgtctcttttaattaatcttatatctaatactatgaaaaacacatttatataacacaacaaatcgagattttgttcatgcagatgaggataactttagcataaaaaatgggtgggtcattttattctgcatccagtttgcactatctttgcaagaaaaaatgtagaatatggccgaatataaatttgatgaagatagcgttaaagcgctgatagattgggcaaagagcacatctttccctcaaagtgtaacattgtctgatgctgagaacatagtggatgtgaaacgttttgtgcaagctaacctcagtgatatagatgcacattatcctgatgatttttataatcctgccatcacgcggctatatcgactgaaggaatatatggaagagaaccaataaagacttggcactgattatgcggaaagccgcgaagcgattaagaaatccgtgttgttctgcataattagtgccaaacctaataaatcacctgagttgtgcccccattatagctttatcttaagtatctttcctccatatccttcgacggccacattagtagccttatagggaagcagacttatgttttcttcttttccgctgagcagctccgtagctttgtactgatccatctgcggtatttgcaggaagtcaaaagcatgagaaggaatatttatggcaaggtctgccgagatatggtcgaagttcacgacaaacagcagcaggtccctctcaaatttgcgcaggaatgtatattgcttatgttcattaaagcgccatccgttgacattggcatacatcaaatcgaagaaagctccttgagagatggccttttcttcattgcaaagagtcagcaaccgtttataaatgctgtataggtgtttctggtcctccgtcagcatcttgccgtcgaacttgccgtcattgcgccaacggcggatggtatctacactccaatagtcaaagatggttgtacgtccgtcccggccgctgaaaccttcgctatccatgcccagctcaccaaactcctgaccgaaataaatcatcatcggattggtgttcatgcaggctgacacaatgagtgccggaatcgccttgcgcgggttactggcaaaaaagtcggaagcgatacgttgctcgtcatggttttccagaaagttcaacatgcgtttttctatgcctcccagactttgccaagagcgggtgatggcagttgccgattcatacccgcaagtaacagctcgcaaggtatcataaagtcctactttgtcgtataaataatcaaacttgccacggaacaagtaattcttgtattctcccgggttgtagacttcggctataaacagcagggagggatattgctccttgacctgcggaattgcccattcccagaactctacgggaaccatctcggccatatcgcaacggaaaccgtctatgttctttcccgcccagaacagcatgatatccagcatcttggtccatgtatcgggaatggggtcgaaatggcaagtcccgccgttctgataatccactccataattcaactttatagtttcgtaccaatcggtaatgtttggatatgcgtcaaaacggttgtttccggtagcttttgccggaaattccctataaggttcggtggctgcacctttcatgtcaaattggccatgcagttccgatttcgggatataatagaagttattatatgggctgaacgcatagttggtatcatcgtttgaacccagttgtgaagtgccatccggctgggcatccgagtgatattgacgagctacgtggttgggaacaaaatctatgatgaccttcagaccgctacggtgagtgcgctgcaccagattctcaaactctttcatacgctccggtacgtccttggcgagatccgggtcgacatcatagtagtccttgatggcatagggagatccggctttacctttcacaatggccggatggtcgggttggatattgtgacggcggtagtcagtttgcgtagcatgctcaatgatgcccgtgtaccatatatgtgtagcgccaagcttcttgatttctcccaacgccttggctgtaaagtcagccatcttgccgcatccattttcggtgatgctgccattattgatgcagtggttattgttgtttccgaatagtcgggtgaacacttgataaataatcaatttgttttcgtcgttcatttctttgttttctatgttatagaatggttattttattctttccaaatgctgcctttgtctatgaacaggcgttccaatatatcattggtcgtattatatccctgcatgaatatctcctccgccttttccagctctgtattgctgtatccctccaagttataaggttctatcagtaaatcagccttctcgcgttcaggaaaagagttggagcgaaacataaagttataggaacgtaaggcaatactcacaatgttcattttatacttggttgccatcaaagggctgacattcacggcaatcactttttcgcatatacggcggagggtagagacaggcaggttcatcagcaggcctccgtccacgtaatgggtgccgtctatattgaccggggcaaacaataccggcatgcaacacgaagctgctacgcgttcggcgatgtcccctttatggaaatgtaccagacgtccgtggtccaggtcagtagctgtaataatcagagggatttgcagttcttccagtttcttggatttcagattgcttttcaggaaatcgatgaactctcccaattcaaataatccgactttgggaatcaccagtttggtcaggtcctgaaacttgtgcccggcaaagtagtcaagaactttatgcggttcattgccgtcggcgtagaataccccggccaaggctccggcactgactccggaaagtatattgggcttgatgtcatgttccaataaagattgcatggcacccaaatgggcaaagcctttgatgaaaccgccgctcaaggcaaaacctatcggatattttttagtgaaccagttgttcgttgctacctccatgttgaaaatataatatattgttcggcacgaaattaatgattttatcgtagggagaaaggaaaatagcggaaaaaagttcaaagtattaagagaaaagtcttctctattaaggagaaagtttttcttggttagggaaaaagtttttatcagttaagaaaaaacttagtttatggtttgcggatgtctatcccaagtcttgggatagacatccgcaaactggggatatgtatccgcagtttgcgaacaaagttttaggattaagggatactgtttgagaatatacgcttaattttttgcgattgctttcagcagtacatatcctccgaaccactgaatcagcatacccggaatgcccatacggaaatcttgcacagccagaaagaaattaccgcacagagcccattcaaaggccgtaccgataatttgataggagagaaccacgcccagcaatgccaataaagagatattcttggcatagcgtgcagcaagagcggcggctccggccagcagaccggactttataagtatagccggcaacacggctgctgcaggcatggcaaaaagcagatgattgatgaccggcgacaggatagccgtcagcagacctaccttgaaaccatatttataagcagctatcagtgtgaagaaatagatgggaagcaacgtcggaccgcctgctgggaccagatggcagagttgcggcaaggcgatgtttcctgccacgaacagcagggcgaatagataggtctttacgttgccgaaaggcagggaataaagttttgcagatgtttccatttgtataatattatgcattaattgataaatctatttttagtatgactgtttaaaacagaaaaggtttagtcaaatcttcaccaattcatatttcatggttcccaatccgattttctcggcatggcgcaacccggcaagccagtccgtgtcggggtgcatcaagtggaatttgtcgcacccgcacaagtcatcgtgctcgtgtgccgtggcgaggcaattgttgccgtgcagtatcggggcttggatgaccatatctgcacatgccttgtccagtgcaaccgggtctgccgaagccaggatgccgaggtcgggcacgatggcggcatcgttgtggttccagcagtcgcattcgggagatacgttcatgatgaagctgatgtggaaatggggcttgcccataacgacagccaaggcatattcggcaatcttgtagttcaggcgttcggaagtatcttcggctcccatcacggcaccgtcgtgctggcagagagctacgcactgtccgcaacctacgcatttggtgtagtctatttctgccttgcggcttgcattgaggtgcacggcgtcgtgtgcgcagtgtttcacgcagatgttgcagcctatgcagttttctacgtcaatcttgggttgcgaggcgcagtgcagttccagctttccgcctacgctggcacatcccatacccagattcttcaaggcgccgccgaaaccggcttgttcgtgtcccttgaagtggttcatactgattacaatatcggcgtcggctatcgctgtaccgattttgggtgccggacaatattccccgttcagagggatttcgcggtagtccgttcctttcagcccgtcgccgataatgacctggcactgggccgagatagggttaaagccattctccatcgcactttgcaagtggtctacggcattggcacgacgaccggaatacagcgtgttgcagtccgtcaagaaaggtttggctcccaggctgcggagcagggttgccattcgagctgcataattgggacgcaagtatgccaggtttccgggttcgccgaaatggattttaatggcagcaaagctatctttcaaaggaagttgctcgatgcctgcccttttcagcaagcgttccattttatccaaaagattggatgtaggggaggtacgcaaatcagagtagtatacttttgctttttccatgtgtttttacctatttatagtgatagtatctgcaaaaataacggattatttccatattaataggtatatggctaaaaaaagtagggaaatcccttttgacaaatagggggataataagaggtctatccatgtttctgcctacctttgtggcaactaaaaactcgataagatgaaaacaatcagactaattattgcgggactggtaatgacgatgggattcagcagttgttccagtttgttttatgatgctaaggtagatgtgttgaacagtatccagaaggggatgagcaggcaggaggtcaccaagatattgggaactccagagtatcgccgcttcaaccgggatatagaagaatgggaatattccagagtgctgtccggtaaaagtaatatcagccgaactcagattgtcgtgacttttgaaggtgggagagtcgttgcaatggactcattctccggagagccacgtacgttgccggttgttcccagtgaagtagtgatagattctccagctccggtttatgtcagggggatgcaccccgaagacttccggcatttttatgaaaaagtgaagtcccgccctttcaaggatgatcaaatcgaaatgatgagaactgttgcccgaaacaacagtctgaactgtgtgcaatgtgccagtttgatggcactatatacttttgatgacgacaagatgaaagtcctcaacatattcgctcccaatatcgtagatccggaaaactacgaagcgattttagacgtcattgattcactgttcaagaaagacgatgccaagaaaattctgggcatacgctattaagaagcaggcatgtcgaaacgcattgtccgttggtgccaaacacatgatgtatcggaggctgacagataatgcgtttaaggtaaacagataatgcgtttcgacgagctcttattccgataaaggaaagtgccataacggaccgttcccgtgccctatattcatgtctttcccccggtttatcgcagtaccgatatactctttagccttgcagaccgcttcatcgagtttgttgccaccggcaagaaatgtagctatggcagaggaaagggtacaccccgtgccgtgcaggttacggctctctattttgggattggaatagaggatgcatccggatggcaggacgtcagccccggcagaaggttgccgacaataaagcacgtcgcacatgtcattgccctccagatgtccgcctttgacgagaacagcggtattgtatctgcaggataattcctgtgccgcttgctgcatctccacagtgccggcaatggttcgcccccaaagcaggcttgcttcattcaggttgggagtaatgagggtgcatagcggaaacagttccgccttaatgacttgtatagtttcttcggtcatcagtcgccgtccactggtcgatatcatgacggggtcatagactatacactccagagtataagtctgaagacaatcgacaatggcggtcacaatactggcatcatgtaccatacctatcttgacggcatccggccttaaatcatccataacagaggtgatttgtgctttaaccatatccgcaggtatcggataaaccgattgtactcccagtgtgttttgtgcagtaacagccgtgatgacggaagcggcataacctcccaaagcggaaatggtctttatgtctgcttgtatgcctgcaccgcccgaacagtcggaaccggcaatggaaaggataatagggggaagcatgaaataattaaaaattaaaggggtgagaggaaagctgtttcaggtggaggaagtgggggatgaaagcttccttcgcttgctgccagacatctcccagcagtacggcacctccgaaacctaaaacggctatttccggaagatgtttcaagctgatgccacccaatgccatcacctttgagtcgataataccagcttgctgcgccttctgcaaggtatcgcaggagtaagcggaagagtagccttctttggatatactgtcataaatgggactgaggaacacatagttacaatctgatttatgtttcaacacttcttcaagagagtgacaagagcgactgacatgtcccttatatccggacggtatctgtggattgcgtccgttcagatgaattcctttcagaccgaaaacggatgccagctggaattgctcatgcgtgacaatgcgtggtatatattccatcggtagctgttgaagaaaattccccacctcctctgccgaagctcccggcttgcgcaggtggagtatttccaaaccgttttggaataaggaggtaactgccgctgcttctccttcaaagaattgcggcgtggtaatgactatcagcttcatatctttatggatgtttgtctataatgagaaaatatacgactgcatggtccttaaatcaatcgtccatagctttccaaccaagggttcaccgtagccgcaaatcagtttcaatacttcattggcttctacgctacccacaatggcaggggttacgccgataaccgatttgtccggagacggcatgagcagtgtcccttcttcatccggatagagctcacggtagtttttcgcaccttcaccgtagcagaagacggacacttggccttcaaagccttgaatggcaccataaacgtagggctttccccaagcgttgcatacgtcattcagcaagtagcgggtagcgaagttgtcgcacccgtctaccactatatcgtagttccttatcagttccccggcattcttcttgtccagacggaaggggtacgcttccacgtttacatcgctgttcaaaccctgcactctacgggcgccacatagaggtttaggctgcccaaggtcagcttcagcatacagaacctgacgttgaagattactgatgctgacctggtcatcgtccaccaatcccagcgttccgactcctgctcccgccagatagagggcaatgggagaacccaatcctcccacaccgactatcaacaccttggcattacgcagtttctcttgtccggcttcgcctatttcagggagggacgtttgtctggcatatcggttcatttgttcattattattaaggttctgtattcggccactcatctcttgaaagccttcaaatcaaaactcgcatcccaatctttccacaccggttcgcgccccaggcgtttcaacgctttgtccacttccacagccttgcgctcgtcgctgacatgaaactgttccagcgtttgcggatagctgtaatatcctcccggctcggtcttgctttcggcgctcatggttgtcacaccaagtgttgccatatggtcgcgtatatcggcaggctcgcgggtggagtaggagatgtccacatcatgatcaaagatacgcatggcaaaagtgacttgtgccagttcgcggtcgctcatgatgacattgggctggaagccgccattctccgaaggacgcatacgggggaagttgacgctgtatttcgtctgccaataatgtttttggagatagcgcaggtgataagccatcatggtgatgtctgtccgccattctttctccagaccgatgagcactcccatgccgatggagtggacgcctgcctgccccatgcggtcgaaaccgttgacacgccattcaaatttggacttcatgccgcgggggtggtagatgttgtaattcgctttgtgataggtttcctgaaaacaaatcacaccgttcatgccgtgctctttcagctctgcatactcttccgcctttaagggcatcacttctattttcagattgctgaagtagggttttgccaggtctagtgcacgggct
